United States Patent Application Publication US 2026/0258423 A1 - sequence listing, part 31

SEQ ID NO: 167803 - DNA, 46709983 bp, Homo sapiens (residues 40,037,137-41,705,350 of 46,709,983)
  source 1..46709983: mol_type = genomic DNA
ttcaacatagtgttggaagttctggccagggcaattaggcaggagaaggaaataaagggtattcaagtaggaaaagaggaagtcaaattgtccctgtttgcagatgacatgattgtatatctagaaaaccccattgtctcagcccaaaatctccttaagctgataagcaacttcagcaaagtctcaggatacaaaatcaatgtacaaaagtcacaagcattcttatacaccaataacagacaaacagagagccaaatcatgagtgaactcccattcacaattgcttcaaagagaataaaatacctaggaatccaacttacaagggatgtgaaggacctcttcaaggagaactacaaaccactgctcaacgaaataaaagaggatacaaacaaatggaagaacattctatgctcatgggtaggaagaattaatatcgtgaaaatggccatactgcccaaggtaatttacagattcaatgccatccccatcaagctaccaatgcctttcttcacagaattggaagaaactactttaaagttcatatggaaccaaaaaagagcccgcattgccaaggcaatcctaagccaaaagaaaaaagctggaggcatcacactacctgacttcaaactatactacaaggctacagtaaccaaaacagcatggtactggtaccaaaacacagatatagaacaatggaacagaacagagccctcagaaataatgctgcatatctacaactatctgatctttgaccaacctgagaaaaacaagcaatggggaaaggattccctatttaataaatggtgctgggaaaactggctagccatatgtagaaagctgaaactggatcccttccttacaccttatacaaaaatcaattcaagatggattaaagacttaaacgttagacctaaaaccataaaaaccctagaagaaaacctaggcattaccattcaggacataagcatgggtaaggacttcatgtctaaaacaccaaaagcaaaggcaacaaaagccaaaattgacaaatgggatctaattaaactaaagagtttctgcacagcaaaagaaactaccatcagagtgaacaggcaacctacaaaatgggagaaaattttcgcaacctactcatctgacaaagggctaatatccagaatctacaatgaactcaaacaaatttacaagataaaaacaaacaaccccatcgaaaagtgggtgaaggacatgaacagacacttctcaaaagaagacatttatgcagccaaaaacacatgaaaaaatgctcaccatcactggccatcagagaaatgcaaatcaaaaccacaatgagataccatctcacaccagttagaatggcaatcattaaaaagtcaggaaacaacaggtgctggagaggatgtggagaaataggaacacttttacactgttggtgggactgtaaactagttcaaccattgtggaagtcagtgtggcgattcctcagggatctagaactagaaataccatttgacccagccatcccattactgggtatatacccaaaggactataaatcatgctgctataaagacacatgcacacatatgtttattgtggcattattcacaatagcaaagacttggaaccaacccaaatgtccaacaatgatagactggattaagaaaatgtggcacatatacaccatggaacactatgcagccattaaaaatgatgagttcatgtcctttgtagggacatggatgaaattggaaatcatcattctcagtaaactatcgcaagaacaaaaaaccaaacgccgcatattctcactcataggtgggaattgaacaatgagatcacatggacacaggaaggggaacatcacactctggggactgtagtggggtggggggaggggggagggatagcactgggagatatacctaatgctagatgaccagttagtgggtgcagcgcaccagaatggcacatgtatacatatgtaactaacctgcacaatatgcacatgtaccctgaaacttaaagtataataataaagaaaagaaaagaaaaagaatatgaactaagaaaaactaaagtctaacaggggaaacgtgtcagaaaaaaataccaatgtaggtttttgaatatgtgaaggaaaaactgattaaattatgcagatgaaataaaaatcaaaaaaaaaaagaatggaaaataagtcactttgattaaagctactgaaagttggagtagatttaaatgtccttttgtatttatttgactataatttctattaattgaaatattttaaccaatttaaccagttggttttgttgtcacaagcatgatatattcattcatacagtaaggtttatgaagcatctactaatgtgccagacacagtctggccatatatgtgtatattataaacacacacaggagatatatatatttatgtatagagagagagttttaagtatgtagtattgagtattcaatactattaattcatttaaaaataattcttgcatgataactacttggctatcaggtatctgctagaccttgagaaggaagtatgaagataactaagacatatttcctatttttctgaagccacagtctggccaaattcatgtaacttgatggcaatttgcagagaatttcaaagtctggggatcataactatttgtactgaagacagaaaaaataaaaagggaaagagaaaaaaaggaccatcagaaaagaagctctaaagttgaggaggaagaaattgagagatttggaagactataaacagaaacagacatgacgaatatcatctagcgtgaagagggcatatagggaaagaatgtgatgtaaaagcacagctctaggagctgctaattgtatcacaagctctagttagcagaatagtaaactgcaaccttgtattttgtgcccaatgttgaatttagttgaattataaaggagcgacggaaaggtttccaaaggctgaaatattttctaaagcatatcagatgttcagtaataatgcagtcatctagggtagacaaaacaaagtttgtggacatttgaacttgcattgatttaagagattattcaaacctatatttataaaatcattttactctgaatagtctatgaagacaatagtaacttagctatgatcttccattgctctaatgggtccaggtcacaatatcatgagcaaaggtcaaatttttaagaaacaatccaacaatatgagcagcgtgccatcaaaaacaagcttcaaccctgtaattatgtaaaggcctgcacaaataggacagtcttttaacctagaagctcattctgtgccctaaatcacacacaaagggaaaatgacggcatgctatctcaggtggaaacataaagtacttaactgggtgacacacaattgaggtgggtacctgctaggacttcagtggtcactggagaaaaataaaagcaagaaggaagaggaggtcagcagtacagctggagtcacagtggggattctagcaacccagtgccagaaacaatggctaacatggctgagtgcctcctctgctgaccccttcacctgtataatgctatgtgcatctaacagaagcccagtacacagtcaccaacgccattcccattttacagatgcaggaactgaagctgagaacgcctatacaacatgcccacaggcttatggtcttctctccagtcctcctcaccttcaggctgaagagctgcagaaagtcatggcatttatcctgcatttttctccatttgccttgcaaataaatgccaacaacacgaaaaaaaaaaaatagttgaaataaaaacacccacaaataacagcttgtcttttcccctaaggaggtagacagaatgaaaataaaggaagccatcattctttattggatgctggcatgaatcttgagctggtatggaagattatttgctggataaactattcttattttatatatttttatgcatttataaagctcatttcagctaggccttgtcccataaaacccaagggaattgtagtaattcaaaagtgaagatactttttgaaatggaactagaacagtggtgtagaaaatgggtaaaatgagaaacaaaactggattcaataagattggatagatcagtctgtgaaggaaagtctacaggcaactatttcagggtgaaaaagaaaaagtggttcttcagatgagaactacacttggctgccataggttggattccacctaaagatgggttttatttgccctgtacaatggtttacaaatatccaagccaacactaaaaagctgtgaatttccatataaaaccaagttttccggcttctcttaaaacacaagtccatactaagaccccatttccacttgcgatcagttggcagggccttgctagagtcttttcttttagacagtagtgaaccctgaaatggcccatgtccgcctcgctcctttgaccctgttctctagcctctgcattctattatctgccatgccttgctgacctcaaaatttgcagctttcacaacccggacgattcacaggtgttcaagttgaagaccaaactgctggctgacttaatgttagccagttaccatcaccttgtgtaattcagtgaggccaagtcccaaacactgactatatagtaagacctctcccctttcagaagccctcagtgtggcagttttaaaatacagccctcacatttttgacagtcttctcatcaagcagtgggggcctctttctctggaatcagggtttcttgggctctgtgactgcttgcccaatagaatatgacagaaatgatagctgtgtcagtttccaggcccaacctaaggaaactggctatttccacagactgtatcttggaccatttgctgctagaacccagccaccatgctgtgaggaagctaaagcaccttgtggagaggccagcacagggagaacacagccaggtcggtgagccactttggaagtggatccccagccccaggagagcctctgcagcatggtaccctcactaggtcccgcccaaatttcagattcataaacaaagtaagtgactgctgtagttttaatccagtgaactttgggatggtttgttatgcagccatccataaacagagcacccatttggtctgaacactgagaagggctttcacagcagatgagggaggaccaggaaggtgcacttccctaagcgacggcccccaggtggccttgctcacctacctggccgatgtgcctttggaactgccatattcattactcttcctccatcctgaggtttggggggagatgcagtgaacctgcagattcccgattcggaaggggtgctggaggtcagactgtccgtgtactcatttgtccctgccgtcaactgctccgatgacgtgtctgatatgaagcactccgtgatggtgaacttggcgtgcctcagttgctcttccatcttggcgtgttcgtaggccctggccagttcttcgtaagtggaggaggcactttctgtggagaccatgctgcttcttgctcgatctacaccaggaaagagaaaaacaagacggacgactcaccatcagaagtctgaaccaacggcatggcccttcctggcttggggctgttttcttccagatcatggtgggacctggtaggagttctggctccttggcggaggctcctgccttaggcactctgaggccagcttcacaagtctcagcagatccggttaagggaagctttgttgcaaccaaattgctgtagtcagatgtcccagcttgggacatttccataaataaataacgccttccctttaaaaaaaatcctgcttttagtgaaaacagtaggagccaggcagcagccccctctctgctccaacctgcaaatggatctatgccctagagactctttaattggcatgaatgatttgagctgcagttcagcttctggggcctcagctcaggaaggaagatgtgatgatatttagaaataaagatgtcatgttgcacggaaattggccacaagccagaatggcccccgacccctgggatgcgtcttctgttgtgattaccctttatggggactagaaaaccatcaggacaaaaactggtgcccacatgcctttgagctgggccacgccatcttggtcagggagatgtctgcgtttcaaatgcactaaaaagttttagggtctcctctgtgtggaactctgagactcttctaagagaaatcacagccttaaaaataaattcacatggcgatgatcctcctctggaacactgtttttgaagtatatcatcaagaacaaaagaaaaatgagtattaaaatttcctacagctattagattcagatgtaatttcttttcaaaatttaagagggggtggtgggcaacccggtgctattcttagggcctgtcttctctctgaagtgaaaacttggtggttgatggcatagactggatgacttaccttataaccaacccctgtttaattgtcaaacggatcagcctgtgttccctatagagggtgctatgacctcatcatgtaacttcaagtgctgtgtcttaatcttggagatggtaatgggtcagacgccctcagagtgtaatcagcaattactgcaatcacgggggtgaaaatttaaaaatgtctctatttctcccagtggggtaggaactaaatggagaaataagcttgggtctaagattcaggacacctgcagaatagatgcagtttggctctgttttgccctgtgtggagtaaaggctgtgcagttgtattagtaactgttagataaaccgcgtaacaatttgaaagtgaccttcaaaagaacataagtaagagggaggaagccctctctcccctccccaaggagcccatgaagctcaaggtgcgggggccgtgctggtccccagggacggaggaggcagcgtcagggcctacctgtgtcttgcgaggggctgacgctgtaactgtcgctctctttgtctactgatcctgcagccctgggtgttggcagcctccagtctgtggtgagggtgtgtgctgagatggtggggtggggtcggttgagggtccactggctggcatagcggtttctcgctgtgggcccagccttggcattcctcctggtggtgggatctgtgaagagccaagaatcatgtctgcctttgtctgcaggagtgtggtcagctgagagcaagcgtagaggtcagtgccacccacccagcactgccgactcgcccacgccctccaggaaaacttccttgacttctcctgtgcagaggatactttccctttcctttatggcttgaaaccttcatctgatacttacgtgtttaatcagccctgcagggaaaagaacaccctacttggattcagaagttacatatttgagtcttgctcttggcctttaataatgttatgacccttctaacattaaaagctagaaatggaatgaggggagactgacaacaattacaggacaaaacaagaaaatttcaaacagtgatgaagattataaagaaaatgaaaccaattactgtgctagagaatgacttgagagaggtactttggttacgatgtttgcaactgcaattaaatggatgatagtacaaaaaataatgttatgacccgatgcacatcatttaaacttcctgggcatcgtcatattctgtaaaacaaggaagctcagcccagtgtgttctaacatgacctcctttctacatccttaggtgttgttatgcgtgaatcacgtccccccaaaagacatgttcatgtcctaacccccaggacctcagaatgtgtgatctggtttggaaataaggtcatcacagatgaaattagctaagacaaggtcatattggaatagggttggcccttaatccactgtgactggtgtccttttaagaagaggacacagacacaggaggggagagggccatgggatgatgcaggtggagactggagtgctacagctgcaagcaaatacatttctgtgctgtgaagccacccatttggtggtactacgttaaaacagctctaggaaattaatacagatgttgcctgtatttttgtttctcatattactactcattgttttaatgatgactgttttattcattaagttgaaagctcctaaagcagagggaccatatttttatgtcccaactctccttaaggccttgcctatgatagcacatctcttcaatagaattgtcctaactttaacagagacaacttgggttatttaatatggagaacaaagggttaagctggtgccagatgggtttcattttctctaaatctggaaccaaaggcagcaagtctatggggtggacggagttcttagctcaaccctttggtgaggtaagaagaaggatgttccaccagcagagactgtcaggtaccagaatgggctacaacatcgcctcttctggaattctgtggaaaatgagagaggttcagttacctggaatgatttttctggggctccagcctggagacagcttaaggtcctagatgggtcttttctacctttgaattctctgcttctcaaagagcagtttgatacagttatatttcagtatggtctggccacttctaaacccagcagactgtattcactgttgggctctcacgaagtttcaaaggagcaaaactgacagggccggcctgtaatgttattgcaccgatttatttatgtgctttcatgagcctggcagtgtctccagggcaggggcaatggtatccctctgtggatccattcatagagcctacaataatccctgacatacagagttttctgaaggaattcatagacctagggtcactttatgaaggcaatggaagctcagagagaagtgacatagctgttacgtgataaaactataacccaaaccttctgccttttcagttcagataacgcctgttacttgaccacatatggccaaatcctgagtgtctaagtttcctagtgctgtgtctacatgaccttggcttgcttataattccatgttggaatgtgaaaggctaacactgggaaggtgcaatgactttgtttttaaacgggagatttcctcactgcaagtttctagttaattcgactttgaatctaatctatcattctgtgtcgctggagaggtgcgttaagatggcagccaaagagatagattttaagatctcctaaatcatcagaatactcaatcttggtaaatattctctggggcattgattttaagacacatttcatcccttacttgcacaattccacggaagacttcattagattttttttgtccttgatgagaatgtaaatgagttatgttggagctctacacaaccaggtatgaatgataattgggtttcttcaccgaaatgctaggaaagaggccctcaaaaagacagaaaaacattatgatggggaagaggctaaatgtcttccaggcactatcgacttgataagtggagcttaaataagtgaagcttgttatttaaatgctaatgagtcttttccagaaaattacccagtcccttacataagttttgaaaattctcatttttattcttctttaagtttcttgcaactacaactgttgtagctcattctgagcaggtttacttctggcatggaagttggggggtggttggggggtatagtttgctagtcccacttcaaggatacagtcatttcctccaatcccccaaaccttgaccctcatttcttctgcttgagctcactctccaatggtggggcaaagatcttcactgtcatagcccctttcctcattgagatcaccctacttggaaaattccatgggaaagtcgcacatgcagccttgattcaaagcctggtctcttttcaagttaattttgttcataatctctttttttctagatgaggacagttttactggtggcctgataatgttgaaaatttaggtcatgatattagtttccttaaaccacagccctcagttctgtactgcgctaggcaggcatcctagggtcaaaattgcctcagtatgtagaatactggggtatttgacacatttattttttaataatttggtttttggagccattgttttgtacctgaactgaactctgctgtatgataatgactaagatagcagctaaaatataatttttacttggattccacaggaagccttttttgtgtaacttactagctcatctactgagcaaataaacgctgggatttactgctccttcatggaaagtattttgttaggctcccagcattctaatataaataaaactcggtgattaagcttcatgcctgctcagcagcccatgagttggagggcacaggatataaatagctcatggcctttcaacatggggtttgaaccctaattaagcttctgcccattgaatcagattattttaattatcctgagtttgggatgagagaggattttgtagataatataataggttacagaacatgtcatgcgtactgtgatcatggtattaatctgctttcatctgtgccattggtttccatatcttgcagttgtggaggtccagctttacataacgaatttactagttgtctcagagagaggatgaaactgggagatctgaacactccctcatgtaactaaaaaatatttatctagcacttattacatcctggaccactggatgcacctcacccaccccaggtatttccctcagggccactgctagtcccatcctgggtaacagagggcattttttctttcaaagtctcagcaataaagattcaagtccatgttgtaagctcttgtcattgaatgtgcgtacatgtgaagtctattctttagtctctacatattctatatgtagtatctctacctaaaggccatgtagaatgactgagagtgagagctttggaattaggctgcctgggctggaagttcatattcactactccctggctgtgtcgctggccaagtgaccttgtcagacagacctgactaatcccctagtctctgagactaggtgatgtcatcacccacgttaagagctgtcctgaagtttaaatgagattaatgtgcccaagtgctccgggcacatggcacaggcacagctggccgtgcccatgattcctatgcagcaaacatgactcaatgtcttttcttttccattcccattgttctgatctcagaacttgatggctgattggtatttatccactacatgcctgtgtcagacactgtggctggtatggggatgaggacatggatagagtcctagttttccagtgtattataatccacaggaaagacagagaagtaatcagtgcagcagaaccagccaagggatgtgttttcactactgacagagataaatagcaaattgttatgatttcttccatcctcataagaatctgttgcaaccctctggcaaactaataaaatgcctagaaacataacttctacaatgcagtcattctggtatgcaagcaacatgttttagatgcttttcttaaaaataaagaattcttgcaatgacaacacagtcctaacatacaaaatagaatcacgatgtgttctctagctgagaaaatagagaatacaaatgattctctgcaagtatgccaaactgtggtgagaagaaccggctccatggaattcacagaggtataaacacctgggcagaggtgagaagctctggtgcaagaagctagtgggggactgtgcttcagaaagttcatgggtttcagactcttgaacccactgtggggccagtcacctaccatttctaactctaaataaaacacggagtgttgtcagtccctcacactgtggtttttgaggaagatttaatgaaaaaaatgatccagcagatcttttactaatacagagggttctgcaaatgctaaattaatacgctcaatttggagagtgaggggggaaccagagactgatgcatgcatttgagtagatttgcttgatgttggtaaacatcatttagtgaaattcagcacaaaggacagaaacattgttctataagctatagtgtttccctgtgatcatcaggctaagccccagggacagcatctcagcactctcagaatgaaatgcacctgccaggcactggcttaggggaccctgaaagatgaggacagctgtttctctgtctcaccttttccctgcctttcactgtgctccagtgccacttccatcctcatcatgcggggaaccttgggagcttttccctgctgccccctctgctcctgctgtgactctgatcttgtttcatgtcttcccctcactggaagtcctcctgaatgacttggacccaagagagcccctcccactgctccacacgcccgctgactcaccatggcttcattctctttctgtctaggacttactgagaaatgaaaactactttagttccatgtctaatgtctgccccctgactaggatgaaatgaatgtctttttgcatcttactcatggtgtatctccatcatacagcactgagccatatacgtaaagtgaaacctgaataaatacttttgagtgctgaatgaacgcattaacattcccagccctgcttccaactttatagccatgagatacacacacgtccctcccatgtgcgtcctgcctggcactcgctgaccactggtttacagtatctgctgtgactccggttcatgtctctgttgatattttacatgccaacaaatcaacttccccattattctggggctgaccatgaagctggaaggttgccagtgcttttgttttgggctgctgcttctcctgtcttaactatttatgactagctttatgcattctcggctgctagctgaccattgacagggaagcagaaatgcatgttgctttttacctggcaggaagaactgatgtgccggaggggtcctgccctgctgcgttacatgcaggaaacatttctaacccttggggcagtgtttctcaatgtggggtccaaacggccagcatcagaatcacccagggtgtctgttaccatgcggattcctaggccagaatctctgggtggaggcctggaattgatatttaaataggcaccaggtgattctgatgcatgtaaaggtggagaacgagacccagggcatctgctctgttgtctcttttgcctgctcttctgccaccgtttccaacagaatgctgaagccaatgctgcatcactctaaaaatctaatcctttcaatatctgtaactttttctgatttagcagcaaaaaagtggctcttaaacccattggagcagtgtcttggagtagcagcaagccacaccaggcagttcacaagggagaagccaacggctgaagagatgtcaaagcccttgaatcttttttttttttggagacagagtctcgctctgtcgtccaggctggagtgcagtggcgtgatctcagctcactgcaagctctgcctcccaggttcacgccattctcctgcctcggccttctgagtagctgggactacaggtgcccgccaccaggccggctaatttttcttatttttagtagagacgaggtttcaccatgttagccaggatggtctcaatctcctgacctcgtgatccgaccgcctcggcctcccaaagtgctgggattgagccactgcgcccagtctggatcattttttaagagcaaggctctggcacacacccctttgcaaagctaattcccactcatatcccgtttatgtcttcagaatgtattaatgtgatcaaagaagaaaggcggtaagaagattagacaaaaggaagaggtaaaagacttctttagaatgtagaatattcttgaaaacattttttaaatgaatttcaatgcctgctgaaactgttttctgtatattacaatgttatttcgtaggcaatgggtttacttcataaagctcactgcatttcgcaaatgcttcccaagctaggatttatgaagaatagcttttaacattataatagttatttttctaataataacacactattctaagaatgtaaatttttgcaaagaaattgattagagatttgaaagctagacgtcaaagtttccaaaatgataataatcaggacatcaatttctcagtctttaaagagatttaggaacgattccaattatgaagaaataagagtatctaattaataagctctagatacatattaggggattcaccttcattgcagtaattaatttccatatattatggatgcaaatattaataacaaaatccaacataatcttcacattaactagaattataatttttctcaaacagtgtgttcaggggcaaaagcataagctttggggatagatgggtctgtttctgaatcttggttttactacttatgtgtgcaactttatactgtttgcataatttatctgaggctgcagttttctcatctgcagaatagaggctatgatacctgcttcacgagtaggtatcttacaggattgttgcaaagataacgtgcatgacatcatcgttctatcccaatactggcatacagcagatacacactaaagtagattacttttttccttttctgtgttgcttaaattaaaaaaataaatacatgtacctgaaatttctagcactttttatagtaaccaatactaacagtaattcaactgacataataatagccaagatccatcaataacagctcattatcccaattagggatgttattatacccatttgtttctcaggcataggtatgaaaagccacacattttcatttgagagagaaagaacattactatgttttcagcattgttaacacccacacattttaagcattgttgaccactcactcgttcccggccgagcgtctgaaacatccactaagggcccagtggcctgagacaccgattggtaatggaccgtgtgagtgaccgtcagggacttctgcttagctgcctctccaaagtcagcatccgtcaacagaaccgtggagcgatcatctacaggatggcaggaacacagaaagccaaacacgtttatctcccttccaaccactccctggccttttctctcctgaggcacttgtgttattgttaatgacaaccacaataatagccccatctaaagtgacaaaaatgattgaaaattcaagcactgaattagcattactctagagtgctaggaatagaagcttcttcctaggggttggctttgggagcaatgagctaagaagaaccatgactatgcagagaaggagctctcttttctctttgggcttggcttttcattaagctaacattgatttgaactctggatttatgtgtttgtcaaaagcttctctgagacatcatctgcgatgccagccccctcaccagtgatgaggctgtcaatgaagacaggtccctttggctgctgggaagctctgtttgcaggactagaaaatcgccactacagttctctctactgaggtttgctctcattctgaacttggctaatgtttggaggggaaataaaagagaagaaaacatgccagtcttcagagcttattgattgctctattttaaaggactcaaggtatgttccttttcttcccacctcctgtaagctttaagcactctagaacatccattaactgacttctcctacatgattcacttgtcagacttcccaagtcctactgccgtgggcacttgaaggtgagcgaggcaggagcctgggtttggatgggttctgggcatcttagtgcttggagcaggagctgctgtttgagctgggtcattatttggtgggccaggattctcattactaccttgtgatatgtttcatactttttaaaaagcttttttactccaagggagactttggctaggatatacagatttttcataaattttcaaagattgcagcccaggatgctgttgctaagagtttatcagtcagcagggaccatactgcagccctgccctgacactgcaacagggatgcgaaagtcgtaaacaacacagctcgacttctgtgcccaaaaaaggctctgaacagaatgaaccttacaaaatccaattactcagtctctggcaggaaaggaaagcctctcaaagttagaataaaatttcctggcagagaaatagaggaaaggctgccaagatgtctgtgagtatcccagcgcatggtgcggtgaggttggcaccacagcaggcgcctgggcttggcttggaggtccggccccgtggcggtcactcgactcctcaaagagggtggctcttccacagagacagcttcctacaactggacccagcacgagaggctccgtgtctacatttgtttttcattaatgatgggatatgtcacagtttctagcaggcaggcccttttagatcacaccagatgatctgcggggctaggttacacacttttcatggaaaattttgggcgcctgtctgatcatgaggttaaccattcattctagctggaaattaatgtcactgtaatattggattcttgtggtcagagcccagagcattttgaagcaccacagttccacttcccagtaattagaaaatgccatcgacccattgtcaggcatcacaaggaggtcaagggctcttgctgatacatgatcctgcatggactgggatggatctctggcgaacggtcatatttacaaatggaaatgactggcaggcttcctctggtgttaagccccccagtgaccagctcttggaaggccatagaccactcatggcatctgcctagctatctattttcatagccatatgtaggattattgtctagtgagacgcatttagcaaatattgtaacgtgttatataaccatggtgacctccacaaactatgtaacctctctgtgtctcagttacaaaagaaacttttcctatgttggctggaagggttaaattaaataatgcatataaatggcttataaaattatatggtcaaaggaattacattctaatttttgaaattttttcaaaggaaattttcagttttaatgcccaatctactgggtgaaacaaaagagattccaggtataccttcccctttcccaaaaaaagataatcaaaagcaaaacatagtagcttatcccttgtcctgatacaagcaagctaataaaatcttgtgtactttagggcaggtagtgccacctcacatacatggtttaactgaagtgtttcactgaagttagctgatcaagagccactttgcacttgaccaatctttaagtgctgctatgcctggaccaaatgtgacttcagccaggagaacccaggccttagaatttaggagccattaggtcaagatgtctccagtggtgggtggggcagcagaagggtgatggttgatggagcaggtgttctgcccacctggtctcttaccactgccttcccggcaggaggcagctgggctatgtgctgagagtcaggcagtttatccagaccacaagaaagggttgtcctgggactcatgccagcaaacaccttccaaaacaaacatagccaggtttgaaaagaggcagcctcggagcctgcctcagggtgtttccatgggcactcaaaagcttggataacttctggttgagggtttcttggaagcagcctgttggtgtggaagcaggtggcctgctgctgtgctagctgtcattggagacagacagcatggcggtgagtgtggccaggtggggaacctggttctgcgcctgtctctgtgaccttggaaagctacacagacctctctacatcttggttacaaaagcaagacttctttcatatgttggttgaaaggttaaattaagtaatgcacacgaagtgcttataaaaactatgtgacatttacagaattctcaatacatgttagctattcttctcattattactggaaaggaaatataaggtatttcactccggaataaatagaataatcgaggcaggcagtgtggggtaatggacttcaggtggaaagaggctgggaagagtgaagatacctgggttctggttgaacaagccagaaaacctcagggtggctgttctgaaaccctaaaactagggccctggtgtttttcccaaagtgctgctggggaaacagctgcaggatgtttctggggcactggtgtgggggaagataccctgtacaaagacatgtgtttgtttaagtgttaagtacagtttaaaagttttatttaatgaaggcttgcattatcagagttgatgaggggggcacggagtggattttcaacctggggctttagagtgcaggccttctggattgatgtgtagtcgattacagatgtttattccttggagtggcatccgtagcctcccctggaaagatcccaaatggatcagagctgagggatttctgtcccaaatgcctggaactgactggcatattggcatatatggtggtatatataagtcaaattttctgcacatttgctggtactgattcttcttcacaagaacaattctctaccttctagctttggtactcacgtagccttcaagacgctctcctgtctaatatttcccacatcctggggtttggattgagaaggcatggctgtggcagccactttgtgtaaagtggcaaatagggcagcttaccaatggtctccatcgtgtctctctcttcaatcaaaagctgagccctgggtatgtcgatgtgcattcgcagggtctgctgttgcttgcttaacgtatctgaagtccgggtattcttactgggaataaaatggggtaatgcattaacaaatccagttcagtgttaacattctaccaacatgcacctgtataccaacttagtttattgtctaaatatacaaataccttgtgaggaggggaacagaaaacgtacatactatgaaaacgtttccttcattcaaatgttatttatttattaatattaaatttcagctggctggagagtttcagaaaatacaaattgtcaatagagattggctctatatctaccaatagaatctttagaaagttctcatttcttgtgtaaatgctaaatgaaacaaatgaaaagcaattaaaaaccaacagcattttcatttgtcagatgtgagatattccagtgatggtgaggaataaagcaccagatattccaaagatggtgagggaaaaagcacgtgcaccagctgtttgtcggatgggagttttactaatggatttgtatttatatctggtgtcattttatttttgttctagaagcaaatcacaaaccttgttagcttccctgacgttagttttcctaactgatagtacattttagaatggaaaaaaagcaattactatcataatttaatctcaaaatttgtgtatcagaagattactcttagagtgagctgttctctaaaagtaaatgaaaataagtagtaaaactgcatggtagaatcggattcagttatagcctgcagttaaaaaaaaaactccacgttgcacaaaaatctaaaaaagtcaataaagactttaattagcaatccacattagaagggtggttgttcagtctttacagaataataagactttactagatgttcaaatagtatttactgaagcatcctctaagaagcagcagtcacttggataatccaatcaatggcataatctatggcatccatcaatccagctcaattgttgttaacactggttttgagaaagatttctggagcctagttaactcaataatggtttacctctgtgttacttttagtggagaccaaaataggaatactcaatgctacattttaaatgctttcccctctaaccgagccatttaccccgagtcccagggctgtgcctccaccgatccttccttgttaatgaggactcatccactcttaaaccaagtggtggacagaactttaattatcccaaagtgaaggtcactcaagtacccccttagatgtttgcctgatgagatccatgtatactcctcgtttgagtaaaagcaaattatcccatgaaaaagacaacttctgaaaggtgcaacattcctacttaggacttgatcttgaaccagattgcttgctctgcagataaggaactgggctatgtacctacatcatgctaattatgcagagcccaaattcaaacgttttgtcctgacttttcacatggtctccaagctctttcaaattactgacttaactaacttgtcattcgttgattttgttaaaaagagagtaatgaaaaaattcaaataatcaaataaaaggaggagcattttggttacttggggggctgcatttacggcatgcttagacaagctatatttccacaaaaacatatggggaactactcctctgtgaatatcccaaagatctgtttagaaacctcactagggacttgagcttgtccttgcaccaaaaatagaagtgtgagctagttccttctgctcttcatgaatagttatgaggcagtcagcggctgctctattaaatagcgatgaacaccaagtgcaggctatacttaaacaacaataaggggtctgctaccagattgccacaggaagcaggctaaataatggctgtgaaccactgcgactggctggcaccaagatttagaacttgattcaactctgcgaaccaggacaaccaaggctggaggtaaattcttcctcctcagaagactataagaaaacggcccaacaagccttgagattcagaagctaattgtttttagagacagggtcttgctctgtcgcccaggctggagtgcagtgatgcaatcacagttcactgcagtcttttttttttttttttttttgagatggactcttgctctgttgcccaggctggagtgcagtggcgcgatctcagctcactgcaagctccgcctcccaggttcacaccattctccttcctcagcctcccgagtagctgggactacaggtgcccaccaccatgtctggcttttttgtatttttagtagagaccgggtttcgccctgttagccagaatggtctcaatctcctgacctcgtgatccacccgcctcagcctcccaaagtgctgggattacaggtgtgagccactgcgcctggccggactcacagttcttctttctctttgcacttggctgttcccgttgtttagaacacacttcccctgctacccccaaaacccacatactggctcccttgttgcaaggctggactcagatgccatcatctttccagtggagccaggctggccctgcgatggggacgtcttctgtgtcctgtccccattctctgtttaattttgtctgcttggcacttattactctctagcatatacttagttgatttatcttatccattatctgcctctctcactggaaaatatgctccaccagggttttcttcacctgctctgtttcctgtgtctccctagaacttagaacagtatatggccaaagtaggtgctcaataaatatctgtgaagtaaatcctcacattgatttattttgagggcacaacgtgagctgagtgagatgtccccaagactttgttttgaggcaataatatccttctcattctaaaaggtcactggattccaactaagttatttcattacttaatatttgctgtcacttttgacaatctattgttacatttatatttatcactctgtgttctgttaacctcaaaaatgataacaattggtcattagaatggcagcaaaccttaaaaaagtgatttgaacaaacctcatttgcaacctggaaaaacagtccaaatgttttcactgtggaagcaaaaattgcatcttttttgcatggcataggatcatgctaaacatattagttattattgagctataatcttcaaccatccatttatttgccatctggttgtttgaataaaatgagaagaagaggagagcagagacggtttcatagggcagagaatttcccagcttagccaatcaattatttgcagccactgccactcttcaaagtcttaatagtccatcatcctcccaaatatgacacagaacattccttaaatgtacaatgactattggactattaggagcatagctcattataacactagggtagagattttttattatgtgcacaaaaatatgaacatcaaaaaagctgaactaatttgaacctttttctgcttacacccaactcactcgctaatgctgattcctggaccttaaacattatatgttagctctctacagtatacagttatctctttggagcaaacacctcttagaaggctgttttttaaaaataaaaatcttacataaaaatataaaaggacaatctttctgtctgggtgtgagggatgcagtctctcttctctggggtgatgtgcatgggtgaaacaggtggatatctaggagcatgaagcccagcaatgggtgatgctgccaggccaggaatccctggggacctagactgagtgggtatgttctgctgtccaatctgccttcctggcctggccctcagctaatctccctgaaatacgcagatacttcttggtagaaaatggttgaaaaataaatgttacatccatttagaacacagaatgtggagtgataaagctagaaacaatgttgaattttttattttatttttattttttaggtaaggaaaacaaagcggtaaaatgacctactaagatctgaaaaccagcttatggccacatggggcctagagcacagacttgtggttcgtattctcactgtaccaggctgccagttcctttgacttctagagaaaacagcaacacagaccaggggtagctgttcagtatctttctctctgccagtggacatgatttgtctggaccccctgggccatgtccaaatatggttgattctaaattgaccagttaggtaatgaggtttttgtttgcttggcccattcacctgccgaacttagattgaaccaacctttcatgggtaaaagctttgcttttacttctaaattaatcccatacaaatccacctattggaggagcttgaaaattctcttccttttcaatcactttgaccatttgaaggaaaaccactgtaactatcataagtggttgtgattactggctttactcttcctaattcatgctggtaactggcaataggaagaccataattaattcctcctcttatcaacagatggtcttgcaaccacagcaactgccctattcatagaggatgcttgctaatgtctttctcagaggctagggagaaggagtaggaatgtactctagaatatgaggagaagagaaaaagcaaatcatcctaattgagcaaatgttgaacatgtcagaaaatatagcccgcagtttcacagcctctggacaaaggcatgatttacagtttgggagtagataggggagggggccagggtaggttgtgcagagcacagttgaggggaggagaagctctctggagggctgaaggagccctgctcagtgtacggactggtgaagcaggcccggggtggggtaggggtgggggctgcggtggtgagcaaactcacgccattctaaagggctactgtgcctacctccaggcaccattatcacctccgcggtgctagtatggccagggcattttcaagagaaatcagaaagccaaattttatgtgaaatctcctcattttaaatgtcatcaactaattcatatttttaaagtctacctttgacaatttcttttattaggtagatcagttattacaagtcatgtgactctgacttctttgttttccagcttctttgtgttaagcagatctttgttttatcagatctgcttaacacaagtgcatgtgtgtttggatgtgttccctgtgacccataaatgtcacataaacaaaaagcacgggctgaaggcatctcatgcaatttctgtaatcttctcctggaaatgtgatgaagtaccccttatgaaggagatactgtacagggaatttgcatctttgcttttcctctgagctccagatttctgctaccagttgtctatctgacatttcctctggatgccttaaaaataatcccaaattcaacatgacccaaataggtcttttcattcccatcaatacctcctcccaacctaccttccaaaaaaatcaaaagtccatagcctgcctctatcttcctaatcttggcagatggcaccaacattcatcagatcagtcacaacaaatgtattttagagttatccttccgtggtggctcatgcctgtaatcccagcattttgggaggctgaggcgggagaattgcctcaggtcaggagttcgagaccagcctggccaacatggtgaaactctgtctctactaaaaatacaaaaatcagccaggcatggtggcgggcgcctgtaatcgtggctcctcgggaggctgaggcaggaaaatcgcttgaacctctgaggcggaggttgcagtgagccaagaccgcaccattgcactccagcctgggcgacaagagcaaaactctgtcccaaaaaaaaaaaaaaaagaaaaaggaaaagacttatccttcatatcattgttttacctacgattcacattgttttgaaatacggtatggccaaacaaaatgtctgtaggatggaatctgtgtgccaatggcattctactactgccttcggtcttcaaagatattagtgatatggaacatgggaagtttttaaataacaaagagtactaattttatatgtatagatggaggaggaagtcacaggcaaatgtgttggtgatgggagtgggaagaggtcctagatccaccctctctctcccacgtaaatcatcctaaactggcaatgttgagttcactatcggagtccttgacattttccctacttatttcctagactctgattttcctttttcacttttcatgtaatcattgcaatatgaaaggcctaaaatgcaaatatcagggtgaggtaacacatcaggcaattaatccatacgtgtaaatgcttcatatcagagtgttctagtatttacagagtaaaaaggttggacagcacaagaaaactgaacatttgaagagggggactgggtggaaaatagagtttggggacgtgaaagtaacacacttgtcacagctttgccaatcacaagcctgtggacgtgtgaaaggaaagctgtgaaggatgcatttctgtcttccacagttgtgaacattctcgtactcattcaataaccactcttcattcatcccctccacggttatgaatggggcaactactgtgctggctactcctaacacgaggatgaactatgaaggctgtgacttccaggaccagaatagacagtgaacagacagtggtaagaggagctgaagggtgccctggtggagggtgctgatggagacacagagcctttgaagagcatggggcatagcacattccttttgtgcttttcttttaacttggattattctgttagaaagaaggcttgacctcaccagtagtaaatttagatgaaggcaaaactaaagctacttcctctttacgtgcttctgttcccaggctaatgggaagccttctattggttgtgtccagccaacaagacaactacctgtggcatgtctacaaatacatcattttcatctacaccttcagctaggcattacatggatattttggaatgtataggaaattacagttttttctaaaaagaaaagacattatcaatttcagactgccattattaaaaaaatagaaatcatcaaggcaagttggaaattgttctttcaaacatgatatctggggtgctaggtcttgttcttacctcatgagcatttcagctaaactctttgcatctggggaaagaaagttaacattagtacatggtaaataactcattaacattcacttaggcatttatgacaaatactctacagtcagatcagaacagtcattttgaaacacaatcatatacccagctcactactaatgacctagagtttcatggagtccttatttcttctaaatgggacttttaaaatgtattttattaattacaaaaatatcaacataactatcctatgattataacattctcagacatctactaaatgttttattccaacctacagtcacttctaggaaatccaattttattttcagtagtcagaaaattaacattttgagggtatatcatttacgttgaacaaacccatgctttttgttatcaaaatatcagaagtaagtggcattattacagagctctgagttccttgggttgaccaaagaatcgtataaatgaaatataaatgttcctggaaacttagatgtttattttgaattcagaaattaaaaaaactttattttttttttctctgagcacattgtttaccaagaccgggttaccactcttgacagaaggaatcctgactaaaagtgtaggaaaaaaaaaatccctttttttggtggtgttattttgaaattcccgtttcctttaaaatataatttattctttttacacatttggtcctggcaaaaatgaatgtttccttacttagagcacaaaaaccttctttttgtttttatttcattgctctctaaaaagtcttgatgctaagtatactgttcaatgaacagaactttccggaaatggactcagctgacagtgtgaccagctctgcagtgaaagtatacgtatgtgggagcatttccatctcatgcctttgggggctgacaattaaacgtagtcagtttctgcacagtgggcagcatgctatttctgaaagacgtggacagtcacagaatgaccacgtagaggctgtccttgccatgagccaagcttagttcgttaagttggccagtcccaatggtaaccccaagatggggcctggttttgtgcacagatgggttcagcctgggcaatgaaacagggcccatatactccacccacacagcaaagaaaagaaatcaaaataggattggatttcccagttcatgtctttatatttatctgcaaagacacagtaaatataatgaatttcctctttccctgaatgatttaacacttacaaagtatatatatatatatatgtgcttatatatacttcatgtatgtatatatatatacatacacacacacacatatatatacacatacatataatgccagaagcctggacttaattagctccaatgaactaccaagcagtggctggtacaatactctaaaaagggggaaacaaattcaaggagtaaacatcccacttcagttcacacttgaaagagttctcagcctcaattgtcttctgatcaactgctttcctcattctgcccgccacaataatctctccttttcctattctcggtcagtcatcacagctctctcctatgagctgttcatggcaatgtactaaggaattgcggagtccagcagggagaaaagagctccccacaatgactgccatgccgacagcagacctctcttggctgccacgtgcaggcatcctccccaaggctaaggtctttcacaggtctagatgccaagggttgaccgtttgggtcaacccttccctaaacctaacactgaccccaccttaaaggagcatgggacgtggggagctttgccatgaatgggcagtgtgctccatgcagagaattcacatgcatcggaattatgagcccatttgagaagtaaagtctaggtcaatttgactggacagagaagttgccaggatggtggtctggtgcacagtctagacattaaagagctaaggagatgtgactttgtattactgacctgaaagcttctacctgggccaaagggagagaggaaaaaggagggcagaggtgggtggtggatgggtgtgggtgctgtgaactagcatccaccaggcaatccagaatgctctgaatgtggaggtgggggcctgggacttgttgaaagcttcttagtccttagtccaagtgagaggctctgggcattagagaagagagccagggttatgtgggtaacattataatgtgaagatagaggaaatctgtacgaatcagagtcctaccaggtgtacagtgggacaaggaggagttgcagggagtccaggaaaagggcaagatttgggatatgcagagctggatgtagtaacatgagtgacaggaatggactagaacaacatggaagcagcaatcttgggagagacttgtctagtttcaatatcgggggacattaggtgaggctgttcagaggcaaatttggaatcaaatttggaaagatgccagggctgagatgagggtctgggtgtttttcatatccccatagagagagtgcaaaaagaagatggcaaaatctcatctgggacacacttttgttgagggtgagaagagagtctgagacaagccaagaaaaaaatttaaagtcccggaatcacagaatcttaagagcaataaagacttttcagattggccacctaatgaatgttggaatccctttcacaatgtcttacacagacgtacacatattctctgtctgcatgaatccagagctggggccactgccactccacggttggggtcggtgctcctgctgcacacctagtgtccttcctctcctcccagtactctcctgccttccaggtctgcaggtctctcccagccagcatgtccccaggggaacctttgttttttctcttctcagtcctaatctcacttattagtcagcatccttactgctggtgtgcccaacactgatacccacactgcaggaagggtgaagactggaatccatcttactgagtgatacctgtgctttgaaaccttcaaagggacctcactgcaacagccctcattagcacagagaacccaccttccgtgctggtccaagctgtcatccggctccgctgccgctcacttgtaacctccaacctctctctgagtttcctgcacttgccactttctgcagagagcccaagactttgctagtgcaaagccctccatcgtccccaccgccccatgcagacgcaacttgctccgtgtaccctcccatgcccagtaggcaggggtgaagcttcggttccctccgcttccctggacctctgccttatatctcagacagcccttcccagctcatactgtgcccacctgttttcgggttgtctttctcttggcccttttgggcacagtcctgtccctgatccatagtgaagctgcacaaagatttcctgaggacacatttaattgtgagagacatcttccttttcttgtgcagaaattccttgatgtaattttaacctgaagtcatttgccagctgttcagatatttccatgtagctgcatttcccttgcttggcctcagctttctcttttctgggttacattctctaattttctcagccactcctcatacggaatgatttctaggtaattccctacttgggaatctcttctttgaaaggtttgtgatttttttatttctctataaaatgaggctgagaaagacgctggtaattcttgatcttctagcacactagggagagcacaatgctcattatacgtgttgcaaatgaatttttttttacaacttctatagaagacttcacaattattcctattaaactgtatcttcttgcttccagcctttcaaaatctcttaaaatgtggatttgtccctctaatacattagcttccccaccaggatgtatgtggcctccaagattggattagcctgcccatgctttcagctacatcctggtgtacccttattaatcagccctgtcaaaatgcaaatggagtttgtctgggcccctggtggtcccttcccttccctgattgctcacaaaacatcctttctataacctcaactaacttatttcagtctataatgtccagaattaatctattgttgttgaaaatgggtccagggtctagatgctctttgacttacgattacctcctgatgaacccatcatcaattgaaaatataattaagtcaaaaatgcatttaatatgcctgacctaccaaacatcagggcttagcctagcctatcttcaacgtgctcagaacatttaccctaccctacagttgggcaaaactatctaacacagagcttattttataataaggtgttgagtatctcatgtaaaaataatggatcacatatcactaacccagacaaagatcaaaattcaaaatacagtttctactgaatgcatatcatttttgcaccattgcaaagtcaaaaactcctaagttgaaccatagtaagtcagggaccatctgcataatcattttctaacacctctaatttacatttgattgttcaaaggttatccagaaagatcttggggttatgtctggaaaaattttgttcagaaccctaaaatgttatccttcagaatcatgggactggaaccccatgacagcttccctaattttttaagtggtggagatctttcctttcagtgaaacagcacagcatttattctgtctgcattaggctgcttacgctttggaacttgtgtaatagttctttgtaaacattgtctgcaaaaagcaacatctccacctccacataatggctaatacagagtatgttttgaaaaaaaataaatccttttaaactatcagggtgctgattattttcataagcatcctgagtttctcccttcccctcccctcccctcccctcattccctccctcccctcattccctccctccctccctccctccctccctcccttccttccttccttctttttataattcctggtccacgttttctgattcaaatagcatttctcctggtacacatcaagcaaagcagatgctgagcagctctcctgtctacctgccatctgttaatatgagaacattgttcacagccttgttcttcttgcccaaacacagctaaacagcccttgcattgcctgtcacattttttcccacacatttcagatcagcctgagattcagacttcgcgacatcttttctaaagccgcttgctactcccacacttccatccttggctctgggctcctcccttatctgttgggctgggaaatgatggagaaatgataccaggataatctagtgatattaaaatgtggaaggaaggaatttcaaaagacaacatttgctaacactctgaatgctgcaaagagggctaaaaaatgatggctgaaaggataatttggagatcagagaataactggtcatctgtcttcaggagaacagttacatttgggtggcgagtggaaggggactgtgggaatttgggagtaattgagaggtagtgtagctgaggacagaatactctcaagtattcagtggagaaaagaatcagagagacagtaggatgaagatatgcaagctagaaggaatatgtatatgtgcctctctctgtatataatatatacatatttaaaatataattaggggaaggctgaagggtagtgaatatcgaaatacaaaatcaatagaccaagtatttttgatgggcaaacataaaattatatagtagctattgatactgtgttaatacatcttctaattccaggtataattgataaacctttagagcttacttaatattgatgagacaacctgtttcttacttgaatattcaaaatcctgcagaagtttcatggcaagaggagtagggtagggagattgatctgaactctcttctagctctgcctggactcatatgtgattctggataattctatagctggccttcagttttcacgtcagaaaatggggtatgatggctggacgcagtggctcatgcctataatcccagcactttgggaggctgaggcaggcggatcacctgaggttgtgagttcgagaccagcctgaccaacttggagaaaccccgtctctactaaaaatacaaaattagccgggcatggtggtgcatgcccacaatcccagctacttgggaggctgaggcaggagagtcgcttgaacccaggaggtggaggttgtggtgagctgagatcataccattgcactccagcctgggcaaaaagagcaaaactctgtctcagaaaaaaaaaaaaaagaaaaagaaaagaaagaaaattggggcatcataatgggcagttcatactcaaccattttgcatggctattgagagactaaggcaggatggtgtatagtgaagtactatggagaagaaagaggagcgaaacaatgggaagcattagtagcctgtggattagtacatggttagatcgagttttgggaaatggcacctctggttggatgaggaggctcccagcttggtcttgcccagttcctgtgttctgtttatagaccacagcttgcatcctggggttgtgcctggcatgaaggtgcacatcagcaaggcagagcatgacacagcatggcgtgggagagtgcccaccatggccccaggcactgcagctgtgcaaagcttgagaggctgaactgcctcacattttgcacactcaaatgcttctttaaaaaagagaaatcttgtttatagccacatggctacattttcatatctgaagttctagttacgtaaaatggaagacgcttaggttaatacttctactgggcagtcacttgcagatatccacaaaaaaactttctgagggtggcagattttgaccttatattaccatccatcaaaaggttttatttgcagcctctccctcaacagtccctgcctttctgtggaattgaaatagtctcataaagtagctatttttgcaagggctataaacctgcatttatgtttttataagatcccaaataggacttccaatcatcacaatgctcagatgaaagctaatttgaaaactgtggcagacatatattaaaaaaagaaggccatatatactggtaatctgaaaaaactgcatgcacagacacagacaaaataggacacccaggcaaggcagagctccagggcccggctgagacccacaatcccctcctgactacccactccctggctcccctccactggtagccctcgactccccctcacccccatgctcttttgcttcccgctgtcagatgcagagagccttttctattcagtttgccataacaagtttgatgttttaagagaataatttcattaagaaaccaagacagaaagaaagagagaggaagagaaagagagagggagagagagaaaaaaggagagagaaggggaaaggaaggaaggaaggtagggaaggagggagggagggagggagtgaaggagggagggagggagggaaggagagagaaggaaggaaggatagaaggaaagaaggaaggtagggaaggagggagggagggaaggagggagggaaggagagaaaagcaaggaaggaaggaaaagaaaagaaaagaaaagaaaaagaaagagaaagaaagacaaagagaaagaaagaaagaaaacacaaagcacagaactaaagagtttcagagtacaggcttctaatgccatcttagccacacttggtaacgaaagctctagggtgcatgtgtgctactcatgcattaacaatgtgggcttcccacattcagggtggctttatgcattagtgctggggcatctattgaaactttgagtctatctcaagtctgagtgtcactgggttcctggatgcacattcctgctttaggttagtaaagttcaagttaccttttggttttccaaatgaggggagctttgggctcatttgcagagcagataaatgtcctgttagtactcagaaaataacaatgatttctcataacctaccccttaatctgcctgcatagcaccatgaacccagatcctctctgggaacagtctcttccggaattgatcagttttgtaacaatccatttcaaagcatgtttaaaataataaacacatttccattcaagagaagcaagacactctgccacaaaagcatggtcaaatgtgacatcactcactgatttttatctttagcttatttgaagtcctgcaggttgacccacactaactggtgccaacagaagcttgtgccttcttgcgtaaatgcgtaccaaaggaggaggcttttagaaatattggagttgattacttgacacgggatcacattttataaggttagggctgctgggatctcaggcccaaccagtgactcactctataaccttgcacttcaaaggatctagaagttcaagaaaaaccagggcatcattaaaagcaaaatgcggctcctgaactcctggataaggttatagatttaaaaaaaaatgtgggcacttgcaggcaatttagagtttaggaggtcgccatgctctaaaattagtaaagtactcaggaagagagaatataggttgacgacactgctagagtcccattttctttctttctttctaaaattttacataaaataacattatattatattcatctaactaggttacttgtctatacagtaaaacatactcagcttataaacatttttgctgtttctagcaattgaaaaatgtgatcaatttcaaccatataaaattgatcccacctaatcactctaaaaacatccactggggatccctataatatttttctataattcaaatctccttatttccatttttgatcctgatagatggttgctcacgcaacactgacatgttactagaaatgttgtccttaattttgacaatcaaaatattctgtctgtagagtctgtaaatatatttgaacttattctcccagaggcacagagtctgtaccttatgtgggttcgcttgttattgggtgattcgactaatgcactccggatatttaatagacaggcacctattcctttaaactctgcagctgcaatttccctccatgagtgagttgaaaatactttgtatcattaatgaacatttcagggccctgcagggctaagaaacaaacgtctttctggggcaatgcctgacctttcatcgattcccctttaccaccctcacctctggcgctgtccttttatggcagtgctttgcacagttacggagatgagtctgccccttgcaagccttgacccactgccactacaatgtcacctttatagttctgagtcttagaaatctcttctctctctaggacctggctaaactcttgtgatcaaatagaaatggtcaaccagcaaatgttaccactagtttaaaaaaaggttccatcttgcacctggtagataatctacagtggtttgtcaaactgaatttattgcagtgtgtctacattaaaacttgccattcagaagtggtgtgaaattgggtacccaatccttggcatcctgaccgccctcctgtcagattcttttttttttttttgagacagagtctcgctctgtcacccaggctggagtgcagtggcgggatctcggctcactgcaagctccgcctcccaggttcaagcgattctcctgcctcagcctcccaagtagttgggactacaggcgcccgccaccacccccggctaattttttttgtatttttagtagagacggggtttcaccatgttagccaggatggtctcgatctcctgacctcgtgatccgcccaccttggcctcccaaagtgctaggattacaggtgtgagccaccgcacccggcctctcctgtcagattcttgatttgagagaaccctttattagccatgtacaaaatgccgaactgcagatacctttgtgccatggcaagctacttttctgaaatcctttgctccttaacatctcttagtaatactccctctttccctcagcacttactttcttcctactgaaacctttgtgttggatttaccttttccccagaacatagaaatcaaaactatttccggagaatgaaaggccatgttctctgaggtgatagactgctgtctttaccaaaaccaactgcaaaacactagtgtctggaagcagggaggccaacaataaaaatgccagccccaggatgttttctggagatagcccttgtacagcaacaattaaattacaaggaactactaagaatacaaatacagggtgcatgggtcatcatttcaacccaaaggcctcactcagtaagagcccacagcacctttaactggaggtgctctcagcgagaggaaatgcacagctggggtgctcaagttcgaaggtgagtaggaaaaataaaatagtagctgagaaggatggagagcaataggagtcagggaaaagaagaaaaagtgaatttggcgagggtgtagaccgatgagaagcattacctagatgcttaactcttgtgattaaatcaaaatcattaataagaaatatttactattggtttttagaaacatcatacagacaatgtgcagccttctaaatgcaagtagttagacatagttgtctaatggtaacaaggaaagacacccttggtatctcataataattctcctaaagtccaggccactgtgaacaagggttatgaaaacatcctttttgtgttttagtgatgaactgaatggaattcaacatggtccacattatatggaacttctcaccataatgggctgtattatacgcttgtagttctgttttacttagcactgaagtagcctcccttttcctctccacttgggattaatccgtccttctttttcactgatgcggtctttctttgaagccctatttctgtattcatgacatgttttgtctttcactggtagctgcttatgggcctacctcctaccttaaacctagagttcagaaagctctttcttctcatctttgtgtattaagcacctagcattcactcaagtaatgtctgcaaaattaaaagataattggttcgcacgattgcgaaagaacatttcaaggagactgatggctgacctgaattattgggctgcaggagatttacatggacagattcttaattgtacagatgaagtacaatgtacttcagaattgtaatttgttggcagagcaaaagcaagttgatagtgaaatgtaccagaattccataaaaagcagtgctttggtgctttggataagtgaagacaggtgaaaatattaccatgttctctgctctaagtggattatggtcaaattaagtatttacagaagaggtcaacgttttctaaatgtatcagtaaagtttgggatatgttttgaggagagagtgcttccagatttgtactttgaacataactttgaaacacacataggatgctgcatagcagtatcccacactgcactgatattaaaatgaaaatcccttgtaatacacgttaccgaaaaagtggcttagttaaacaccctcactggtaaagggcaaaggacctgggaacacgtctgcacagtttcatatttgaaataactccctgtcctcacattgcagagcaagggcaagtaagggctcttggccagaagctgagaacagcctcatcacagaacgacacggggctggacattataatcatggtgtctgttcacaatggagctcatctggcctggcttctccagccttcattatgtttttgctacattagagtgaaactcttacactgggcttcagctcccgtttctaatttgggatggcatgtgtcctctgcctcacaatgcttcaccagtatcctaagccctcaatttccacttccagtcagtcaagtaattctcattcccagagcaaatctgatagatcttttcatagaaagccacaattggtggctttgctggacccactgaaaatttaagagactagagttaaaaaattaattttccttgcataccaacagctaggatttaggggacaggttggctttcacctgatttctgaccgagataggaacattcttattgctcttccctgaggctctgcagtctcgctgaaggaatgtcagagaaccaggcagtggagggacctgggttaaagagggaagagtcactcccttttgaggtttgttctccagctggcatctctcccattggctgcagagcagcaggggacacgcgtaggtggacagctgggcctggacctacctcgcagcctctttagcctctgctcccgccgcctcctccgcacaaccagcaggagcacaaacagcagcaagacccccaccaggatacaggagatggtcaccagcatcttgagcccctcgttggtcgtcagcccttcttcgttttggacaactgacttaatgagtggaggaattgtacctgaaagcagggccacggtgttagatggctattaatgaagacggcatggcggagcttttagggatgacaggttataaaaatcgcgctgtgtgatccaagggtgttggaggtgatgagaaatgaaaagaactctgtctctaggccctggctaactttttttcttatttatttccctccctctgcctgaacttccaacttattctatagtgcacgtttgaaaaggacttcattttgcaatgcactacagtgtgcaggcacttgaaagcatgaggcccaggcttggtgctgacaaaagccacatgcatctacccagaattaagtgttcccttgactgtcacccacagtacaattgatagagactattcgaaaaaattgcacatcaaagaatgaacaaaaggttgggcaaatggacagaagcgcgtgtgcagggagagggtcctagatacactggcataaagaaactcaaatcccttgtgattaggtaatttgctggcttttatcgcaggtgtaagaccaaatctacttcaacagctgtggtttgagggtacaagagctacagacagcttttcaaaggggacccaactaggtttctaaaggagcctacttttgatcaggcatggttaaatagtgctacaaaatctagattatttcgagtaataaggaaacactgaaggaagatgaactctgagctatcttaagctgccttctatccagatgctcagtaccgtgggtgcagagatctaaacacaggcatccactttttatgaggtatatattttgctaccctccattatataagatgctccacgccactgcactttccatgtacaacaagggccagaaagtcagcacttcaggaaaagagaatgcaaaaataatataatttctccctcagcaaaacggtctttatcctgcatttagtaagcagagcagggataatggaatcctcgttcctctgtgatctctgctaaagctgagaagagtgttctcccaactttaaagtgtttttgtggaagcccaagtctccaaatgcttagaaattcaggaaagaggcacttacaggatgcccatgaagaggggtctgcaaaaccaagacaacactaggtcaagcagaaacattcggctaaggaaatggcagaagaaagagtgagatcattaaatggaggactctgaaacctgagtggtatgaatgtaggctgccaatcttggctttctcaagataacaaagttcttcaggcagatgtgacaatagaggctatccattcatgagactggtccaaagaaatctgtaatctctctcaaggaaaatataaatatgcagccatatttcttagtgtaataaagtgatttcatatttccaaaacgtaaaggtagcttgcagcatttttcaaaatttgggatcttggataaagtgagaaaattatatcttttcttagaagacaaacatttaaaatccgcagaacactttgtgaattagaatcacagtttcaaattctacacatgagtagtttctaattaaatcattagctgtgagcatatcatcagtgtgcacatttaagctgggtgcccaggcatctgcacatattatagagaagctgggaaccagagtgtgaatattgcaagataatgatctaaagtaaaaaagatacttactactcaaatgtgtgctggttaacagaggattttggtgcacccttaaatgctaagtaaagtgtctggtaagtgtcaaagttctttattttgtaagatcaaataattcaaccatattacagggagaggccagcttggaagtgctcctctgcctctgggtgatgctttgtgatggggacacctttgaatgaagtcactgaagagtgagggctataaaattagaaagaggcagcccatgaaaagcatcagcccttgaagagaaaagttgtcgtctgggagggcataggctattctggggccataggacagagcccgtgcagaggccagggaccccggctagcgtaaccaacactagaagagctttctacaagctcaaggtcttcctacagccctgagacccaggccagaagtgccaggaagaccctggactctggcagagaaggatgttgtggaaaaatgaccttggacaggagatttggggtaggtctgctctgtgtgccaaagcaagaagagccagccctgggccatccggacattataggagaaattggtccgatgaaaatcccaggcaatgtcacctcattagctcctggtggtcatttctgtgggtccttaggttcacagccactcttcttaggatggcataaactgtgctccaaggagctacctgctggagctttaataaagcggcctcccaaatgcacaaagtaaagaaagaatcactctcctagagagcaatgctgatgcttttcatgggctgcctctgtctaattttacagccctcagttatgagtgacttcattgaaaggcatcccctcacaaagcatcacccacaggtagaggagcacttccaacgtggtcttggcttggctgtcaataaagggtttgggtgtttcttggttaactcattcaacactgtggtctagcctgaccaacaggcagtgaatagaaggctctgaggagagttgcactggagttccaactcatcctgatgcattgctgccgtttttaccttgcaattagagcacctaactcaatccttgctgttcccctagtgagaaatgagcatcagcccgctgctgctgggactttctaaagttcccctactaagttgcagtcgaggactcgctcctttcagcttcactgggcttagcatttgttcagttagcaataaatggcccttgataccagaaaaaatgagtgagattttaaaccatttatttttggttaactaatgtcaagagacacctcacctagtttttggaaagtaaatgcaagtggcaagtgtgtgtgagtttgtgtgtgtgcacgtgttcatggattcctattattatcctatttccatcagtggccctgctcctgcccagagactaacataagctcctttaccatggaaaattgtttttgcacatgcagtttagggtgtaatgagtgcaaaaaagaaagttgttatgtggattgggatgaggtggggaaaggggtgggagacaacaaaagcaatgttagctcatagacatcaacacaagcacagaaccacagggtcaagagtccttcagccctaagagaaatcactcctgccccatgactccccagtgagactccctatggccctgagtctcttatttctggacacacagtgatggtcatctggatataacgaactagggagccccagacagagtccattgaatcccgaaagcctaatgggctccgtgggcactggtcaaactatggcaaagatgatgttcgatgggaaaggggcagggcccacgtgcacatcccccaagacacaagcaggagagccacaaagccagccagcttactgccatcgtagttcagcgtagcgaagttggcctgcttctccgcgcagcccgcactgttgcacacccgcatctgcagctcataccaggtggcttcctgcaggtcatacaggatgtaggacttggagagagaggtcctctgagctgtggtccaaactgtggtcccaaagggcctgtactctagtgtgaaggaggtgatggggcagccgccatcattccagccaatgaggttcagcctcacgcgtgtggtgttgatgctggcaaacagctcctgctcctttgagaactggggctctgggggagaaggcacatggaggtcagctcacaggacacatggggaggccatcagcatcttcacgcatttccctcggactgcttcctccagcgaggccaggagctcagtccaagtctggctcacaggccactggcaacttgtcccctgttaatagagactttatggaccaacaggctttctccaactgtaatgacctgggtgtgtgacagaaaattgcatgggtggaggttattttggggtatcttagagttccctaaagaacaataggatgttcacatatgggtttccttctgtggtttgcggggcagtgtgctgggcactttttccatcctcatgtgatgaacctgattcaagagaagacagagttggatttgggaagcaccaacagattttcctccacaactaaacacttggtcttggtgcccagggacctaaaggatatatttctgcataaatcaatccccgatcatttgacctcttaccacttgttacccaaaactgtggcaccaggcacaaataatacccttgctatctcattactcgctctcctgccatctgaccccaccccacctggtaggactcctatgggagggaagcctgcaaagacatctcctcaccttcttcctatgcccacatagagctgcatcatccctccttccttctggagttcctgggacaaaacctctttctctgaatatgatttctttgggattcatctccttgaaagtccacattttagattaaaaaaaaaacaaacgcaatttaccccatcattttccctctgaaaagcggtggctatgtggcaatgtggaaatgataggaaggtgggagcaagggtggctaagggagaagggcgcctccaaacggctgagagggcaagcgccacgcttcatggctgcccagccttggcacctcacattcacaccaacgcccttgattttcaaactgacattcttctttttaactgcaaatgaaacaataaaagagaggaccagaacactctggaaggtccagctgtccctctcattatgccgtggcactgctgaagccatgtgaggaatgacaaagttcaaacacataaacgtaaaacatgatggatcttttatgattccaatctcctcttctggccgggaaaagaaaggatattaagaagcgatgagaaggcatacctaccttttcctaaggtctttgcttctatgatttcacttatgcgccctgggcccactccattttgggctgtcagtgtgaacttataccaagtcccacatttgagattttccaagcgataggaacgttcgctggggctgattggaaaactcccccactgctcactattgtcctcggagtactgcagtatgtatcctgcagagaatgagaaagattcacatgagcactgtgtttgctttctatgggaagtggactgatgcttgcattttgtgtgggtaatagaacgagcattctcagaactgaagaatcttcagaaggaacattttcgctctttctgattccaggaaatgtaacccagcctgggagaagcaccatgatgtattgattagtgagtcatttgggccacaccagacattatcactgtgaagtattgctgttttctgctcattctcttctaaaagccatattgagcagcagggaatacttaagttgccaaatatctgtccctcagatcatacatgcctgaatccttgagtgaagacataggctgaagctgttatttttgcaagacactcgaatctctgggaaagggatacattatcaatgggagtagagatttcttcaactgcctcactcctcatgtactcctggtctcacagttcacagacactaggagaaacagctccaagtcttgcagccatcccactattctgacagtaacctggcttctctttggtttgaaaaattcctccaacaattcattcccccacatgagcactacctctacttttacaactagtaaggatgactgtccactctagagcactcactccatgccaagccctgtcctaagccctttgcttacagtatttctgcaaccctatggaacagtgacgactctcccacagaacacgtgggacactgaagtccagagcagttaagcggtgagtcccaagtgctgaaaggaggatgcagatcctgcagtcagcctgaagcccatgttcttcacccctgtgaatgctgaaatattcttcctgttaactccttcagccctgttatctgcagccatgttccttctccaccctggctagctggcctggaacatggtgtgtttgcaacaacgggttggtaccttctattcctgtcctgtggagctccattttaataaaaataaagcattttttttccctgcacactacagtgtctcctaaacccaaatgggcaggtttgctgatttccacaccccttacatggcgatcactcatctctgatgcctccttctgaggtcattgtcagtatctcccctactcctttcagccttccctcaccactggccttctgtggccatagggtccctcctccttcctgagcctttgtgttcctcatctgacctccataaagctccttcagtacctgacaggtgatacctgtgcacctgctcccagccacatcccagcctgtattccagccgccctacacattgtagggactctgctttcctcccactttccaccctcgaagccacctcaaaaaactcctctaatccttggtgataggcctgtatagttccctgtcccctgctatcatcctcagtgccatcagtgtccatcagtgtgggcacacaacttacgacacctcctgatgatggcaatggctttggccactactgtgtttcaggaatgctgggttacctttgtcttggaaactctccctcactaaaactggcttcatctggaagaccttgtgctctgacacacccttcttgttctacctctcccatgctctcacacttgtagaatccaagcctcatttcatttgagcctaaaacctagggtccctcgagcccatccctaggtgccccctatttttttcctataagaaggttctctagtcagcctggaacctttggtaggccatttcaacaaggagcctagtttctctcactcttcagacttctggcaatgcttatgttactggtaatctgtgatccacttttcttcccagctgtccagaatcatttagaaaagtcattaggccaggtgtggtggctcaggactgtaatcccagcacgttgggaagccaaggcgggtagatcactaagtcaggagattgagaccatcctggctaacatggtgaaaccccatctctactaaaagtacaaaaaatcagtcggacgtggtgacacgtgcctgtagtcccagctacgtgggaggctgaggcaggagaatcacttgaacccgggaggcagaggttgcagtgagccgagatcgtgccactgcactccggcctgggcgacagagtgagactccgtctcaacaaaacaaaacaaaaaagaaagtcattagacagtgataattgtgactcgtacaatttgtgctgtgcatctgcagctgggtccttgcaagcttcttggcaatgactcggttcatctattaatgactctctgtgcattccacaaggcagctattacaaacctatcccatgctcctcaaatccacagacacatcctcaccacgattttaaaaaaatcacctcactttttctttcctaaaagaaaaaaaaaaaaaaaagatcttcccttcacccattggagtgctgataaatgtttaacaactggttcttggagaggagaaaaaaggctctgatttgtagcatttctgatttccatggtgagggaatgttcttagggtggctgtggccactgagcatgaagctgggaagggatgtggcacctcactctcggagctggaaggagctgctccagcacactactgatgtcactctgaaatgctcctgacttcctgtttacttcccagccttctttctctctcagaagaaaggatgttctctgccttaggaagtctaagcccctattctctctccccggccctgggacctcctttatggtacaggccctctttcctgtgtatcttctgtctctagcttaactccacccacactagaacgaccatgctcactccttccatataaacctcatttaggccgggcgtggtggctcacgcctgtaatcccagtactttgagaggccgaggtgagcggatcacctgaggtcagaagttcgagaccagcctggccaacatggcaaaaccccgtctctagtaaaaatacaaaaactaactgggagcagtggtgtgtgtctctaatcccagctacttgggaggttgaggcagaagaatcacttcaactcgacaggcggaggttgcagtgagctgagatagtgccactgcactccagcctgggtgacagagtgagactccatctcaaaacaacaaaacaaaacaaaatcttgtttatacacctcaactatgaactaattgcaaaggttttgtgcaaatagattgttttacatctacactttaggtcctctgtcttttattactttctaagtcaggacagtacccatggttacataaatgaatgactttgtgttgacaaaataaaaaagaaacagtgtttagaatctcaaaaaagagatatccaaatttcttttttctttctttcttgcaactgttgatatttcactcttaaatgagcatccttggatgaatgatttgaatttcaacaaatatcctaaaaataaatgtatggtttctttcttaggtaatggagggattgtttatatgacgtatttttgggggagaataaagtaacacataccagtcatttgctgaagatgtgtcacttattggcatgtggatcacacaactaatcaactattgtggacaatctatatcttattacctctgatagagctgcccccgttgtctccagggagccaagaaagggtgatggaggaagacgtggtcttggagactgtaagccgaggctgatctggtggaactggagaggaaacagtttttagaaaacaagaattagtttttcacatctttaactttcctgaacagtcatttaccaactcatttttaacagccatttattaaataagtgtttcagtttgccaaaatatacaattcacttctgtcaaaatgtctatttagttgatatcctgggctaaagagatagaacggagtgaatctattatttaaaaaaaaattcagccacatttctacttggattcatatctaactcatttcctcaccagttccttgactgtctgagttatttatcactaattgaaatcttctttaaacttactaaggatacatgcctcattttactatgaatttcagccatgaaatttaagtgaaaaagataaatggcatccacttagcagttccgttcttctcaggatggaaaaggggaaggaggaaaaatagctagtgggaaaaagaattgcaaaaatcttcactttctaagctattgctccaagatgcaacacacacacacacacacacacacacacacacacacacacacacacacacacacagaaaatcaaaagcaggcctttgaactgcagaatatgaactggtctctcttacaaggcttgtagaatacatactggtaagtaagtctggatgggttctgagggcagaaacactaaagaaattcagaatcaggttatccaaatcatatagaaagcttcatataaaattcccttctcttttcctctgagagaagcctaatatattgacctatctcttcagagtcataatatagtgcctgtcttccaaaattccctggaattctcctgacttcaattaatttgaaattcaagatcaattttgcagcatttttagaaatatagttcttttcctttccttccatcccaccgagaacagtattgattttatttttacttgctgtaatctattaatgtgacaacacctaaatccaaagaagcacacactttgatttttctactaataaaatattgctgtgcatacaaatctgaactcaatcacttattgattgggatttacacaaaattttaacatgacaatcttttgaagttgtgcacattttgtgtatgatatcaagaaaaatacttagtattaaatacatagctaaatactacagcgatctacttagagctccagttactttcattttttaaaatacattgcatataaaaattgagttaattagcatacaaaaaagaccacaattcagacttgttttttgtttgtgttttctgggatacacttacatatatgtagagtaaacagtgcaattaatggaaattattaagaaggacttttttagacatgtacacataaagaaaaaagagactaggctttctgtatgcaaagatgttttgtatctcagtatttctgaggttgtgaatgctttgtattttctttgatttgtttaattatattttgcaaaatgaacatgtgttttctttttctgtaatatggaaacagaagttagctctttataagggctgattttaaaatttgttcagtgctactttttgcatagaaagcatacatgtaaaagatatcattaaaaagagtcctcaaatgttgtaccttgtacttgtaagtttaaaataatttcatcagatccccagttgttattggcaatgcagctgtaatagccggagtcttctgctttcaccgtgcgaataatgaagcttccgttgctaaagatgctcctccgcccatcaatcgttactagactgggtgtcccgttactgcctcacaggaagaaaaatgcacagattaaagaaattacaatccaaattagctgaggttggggaaaaacagaaagactctgtgaagcaaaccacacatttggaagcttcatatttcttgcattatgaaagaactaaatatgattacataatgaaaacaatcaatagctgtgtagctgaagttttcctttgtaaaaaatgttacgttgaagatgagatctgtgtcaagggcccagattctggctcaagtcagtggactcctcatctgtgccagagactgatgggtccctctttactccactctgtgggcactggagatatcctcattttggcaattctgggaatttcttctgtaggcagaagtgccagtttgaacaaatcatacaggggaaactaaaccttgggatcatttttagattcacttaaagtcacaattattcatgattttgacatgaaaaatgacatgtgatatctcaagagggtgatgagtttaccctagtataaaaagaactgcgtggccatcataaccactgctccggtggcagattgtccagtcctttggggtcattcccacaacaggcagaatgccaacttgaccttgggagctacatatttcatttggatgaaccaactttaaatgtatgagaaaagtggtcactaaaccaaaccattatttctacagtttggtcactacaccaagccattatttctacagtttatgccttctaagtgcttttgcttgaaaataggcattcttctgaatccattagatcacatttctatgctcataaatgaattttcgacccttaacttatatcctaatttcttctcctgaatagagatatagcactttaaaaagttatatggacagaccatatctcactcactctctccctctatcttggctcctattatttaaataattactatggagtatggagaaccagattttaaattagcaaagtcctaatgtactccatttcttaaagttctttctcagggtatttgagttatggttagttcactatctttaaagaagaagagataggtgttaaatctcacaatagccttggctgcattcatctcagttacatggacaatttacctgagagggtgcagcaaacttccacaataattgagttggttcaactactttccttgcaagcattctctcatgaactagaaggctctgaattaacagagggttgatacaataaatcagaccctttcagtgctaaagctgagattccttctctgccctcatctcagaagaattggtaggtttccttgagttttcactaatataaataaacacaaaattaggagaccactagacacaacctgagtatgtcagatgtaatctcttagagtctcactgaaggcatacattgggttactggttacctgtctttcatccatttgactgcaggagaagggtccccaacagccttacaaggcaagacaatgtctttcatccatggagtagtcactgtcccactgaaggtcaggattcgtgcaggagctgaggaaccaaacaaagtggaatcctgattactccacagacgtgtctacacagaggccaacatgacctactcaataagggcaatacctaaaaatggatgtgaagccaattcacattacaactgtcaacactactctctggtacccgggttatgaggaattgtcattgtaagaacacacaactagcagaaaattcccattgtagcattcttttcttctattgactaaacatgaggagtccaaattaaatatctagggcttcataagccaagcagctccaagctgtgttttctatgagcccaattatttctcaaagcactttaggaagcaatttacctcaacacaaaaactgctcattaaaatatactttaatatcagagaaagtagacaatacaaaacacaaaggccccaaagacgggaaggagtaaaactggaacaagttctacttaacaatttcccgactgtattatagcaagttgatctttaggacacacattaaggagaatgaacattttcagagtggcctctcttgaagaacaaccatttgcttggaacagtgattcagatgcccaaacaggagcatctgccaggggcatctggtactggtgcagccccaaggtagcagaagtcccagaagacagtcagaaaaagcccagggtgaacttgccttgaagtccagtgtggccagcaatgagaggttctagtgctacctccatcagtgagtcacaaaagctgacagggacaccacacacaagtcttccagaggaaaacaatctgctcagtctttgccatacattgggacattactttctggggtgtaaacaggagcccggggcttctcctgtcctttgttttagccagtatgcttcagacactgtcatggagctggggacatagaggaaacaggtgcccctacaggagctcaccctcgatggatgcacagaccggaaaccataggtggaaggcagccttgaactgattcagagcccataaaaatgggacaaatgtgagacccctgcaccatttctgggttgagggtttgcattggcaaaggaagatgaggagaaggctcccccagggaagctctagaatccctggaagggcagagtacccagagccaagtcattatgcagccatcctagtatagaatacccacattagtcactaggatctaccagaccaaatcatacatttttgcctctgggcactgtgggcaagagtagagagaaaaagaaaatgccagagggcttagaagctggaccttgttttttgttgcagcaaaacccatgtttcaagcaatttccctggactgagatgaagtattctaaggcagggcccatttcatcagtcattgacatttctgattttgcatcatgataacaaaaaggtcctgattaggcagcatcagatttcctgcattggtagcttttggcattttctttttcacacacttcagacagttctttagagagtagagaatgtcctcagcagtaaaaggcgggtggctagagaaattcagctagagttaggggctttccagctttataacagtcacccactttaagaaatatgttttacatcaaactccagaagctacacatgcattgggatgttgtgtatgtgcaaacaaagttgcatgaataaagacttcactgtatgtgatgcattctgatattttctgtcttttttaaaccctagtttagtctagtctagttgatttgactctgttccactctattccattgttgttctttaacattctgggcataacccctcaaattaactccaggacttatgaatgcttttccattagcaatttaaaaaatacaagctagagctacttcatcttcaagcccaacaacccccatgctatcgctcaatgcccattttgcccattttagacggctgaaatttaaagggtctctagccagaaatgtatgactgggcaactcaacacactagacctggggcagccaagagaatcccctagaatctttgtttaaaatgcaggttcccaccacagccttgtggattcagcagctctttcctgtacttggggcatctgccttttgacaagcatcccaggtgattctgatgagaaactgaacccctctgcaacctggtgtcccctctgattcgggtcccgtttgttctcagccatggggccaggctctctgtgccttcgtgtcctggaccccttcctaggaggggcttcccccaggaccagtgccatggccccattctgccactccctccataaaagcagtggtcctcctcttcttcaactgtatctgaattttggaccctgctacctgtcgctagactgctgctggtctgccttgacttcccaacaactacagaataacctgtctcaatctcctctgctgtggacatccccatccctctaggatgggcctttcagccttcatggtttgccagtgtctgggcttctgggtgggggctgcccaactgactgtctgctccatcctgaggcactccctagcttatcccctttccagaaaacctacctacagcaatcctaaccctgagtcaacctcccttaagcatgaaaagttgaacatttctggaaaaaaaatccacgcaatagagcatttggagattgaccaccatttaggatcatcaacctcaattgaactgtcagcactccctgctggtcttactgtttctttagtaaatgtcctccccattccctgcaacgatggcttcctgctgtccctcctcttctcacacttctgggcttccctccactatccccaaattgcctaatgcttcagagacaccatccaggaaccctgcatttccagccaccaaatctgtgaacctactggcatttcctcctctaaacctcagtgctgtggtcgtgggctctttcttatgtattgttgatttctcgtttctccctctctactgggatcttcccgttaccacataaacatgctctgatggcaggcctcatgaaaaataatgaacccagagcctttcctcgaatgagagcctccctccccctcccagcttcttctcttggttgtcacttcttccaggtgatgtgtgttgaaggaatgttctgcccagtcagcctgcccctcacctcctacccactttctcacctgactcaggctcatttctgcatgcccctccacacccactgatgctgctcacaggaaggtcaccacgatcttccgtgtggccactgaggggcattttcgcctggttttgcctgactttccagcagcagcagcctcacctgaccactccctccttttgcaagcatctgttttgaatccacagcctaacaccctcctggctctgctgcctctctggcttttccccttttcctttgcctgctcccactccctttgagagtccgtcctgcaccttcatctctcctccatctctcagccaatctcattcccatcccaggtgtaagcgatatccagacgctgacccgcctgaatttctgcctcctgccagatgtctcttgagagccaggacatgcctcagtgcacagatgcctctgagtgaatggctcttcgtcaccttggattgaacccctccaaatgtctgtacctcctctcactggcttcaaaatccacttcttccatggtcttcttcatcaagaaatcgtgcctccacttatgctaactcatgtgagaatttgggtgttcattcttgctatctccttctccaccctcctccatttctgcctctctgcagtccattcaggacagagagaccaggtggtcttaaaaagcacacccgccattagttgtaagaaaggcatttaattaggatgtctataaaaagggaaactaggtgtgaggtaaatggcaactctctgtactatcatcacaatttttctgtaaatctaaaactgttctaaaaaataaggtttatcacacacacacacatgcacacagagagaaagagagatcatgtgcctcccttgcttaaaaccctacaccatctccttatttctcttgcggcaaaatctgaaatccctaacacagtgttgaaaacccagcatgatcaggtccctgtcttccttcccagcgtctctgggaccactgttccttccccggccccagcagggtccagtgtcctggacctcccacctgctaaatctttctctgcaggagcttctgactgctcacttcttctctcttcacataaccgcctttgcttgtgctcagggaccaagtgtgtcctccatctgacactccaggtgaggtcctctcacactatttctttatagcacttactacagtttgtctctatgcatatacttttgtgatgctttgtttactgactgtattagtctgttctcatgctgctaataaaggcatgcctgagactgggtaatttataaaggaaaggggtttaatggactcacagtgccacatggctggggaggcctcacaattatggcagaaggtgaatgaggagcatagggcatgtattacatggcggcaggcaagagagcatgtgtggtggaactcccctttacaaaaccatcagatctcgtgagacttactcactgtcatgagaacagcacaggaaagacctgctcccatgactcaattacctcccactgggtccgtcccatgacacttggaaattatgggagctacaatccaagatgagacttgggtggggacacagacaaaccatatcactgactggctccccaccaaactgtaagcttcagggggtcagggagtgaacacatctcttaaaccatctcaaaagactcctctgggctctccaaaccctgttttcttttccctggtgggtccatgcctttattctagacaataggatattagtaaaaataatgtatacacttccgtatctggctcatgaaaacctctcatcaaaccctccatactcccttcttcccccatctatttagctgtaaatgaggagaaatccagggttgtaaatcataaggtggaaggggcctggatgcctgaatcaccatgtggaacaggccacccaagagagccctgaccaaaaatacctctgttggactatattattatgtgaagccactgagatttagggaacatttatttcagcagtcagcctcccttgaccaaatcctctgtgtccccagcatagaccctgacatacaacaggcactcaaaatgacttattaaatgactggaggacattgaatttccccaggcaagacctgcttctgtgagagttttcaattgttcccccactgagtaagtcataccccactgcactagccaggcctttctggctgtgtctagagatagaactttgaaagcacaaaggaaaggaagaaacattattgctaatcctatgtgttttgttgcagtgtttttttgtttgtttgtttttgttgtttttttggtaaatcccacagctcagtccttatgtccaacattttccttggtaatcatcattttctcattctcagggagtggctggatatcatgaccaaagagtgtaatacataaagtaagtcccccagtttatttcccttaccaacttacttattttctatctgtatttgagctcaaaatgtgacacccctcttttttcccctcactgctttattctgcctatttcttaactatctcattaaaaagcacatttttcagagaattcttggaggtaaaattggaatcttggaatgttcattcttgtctttcaggctatcagagaacatattagtaataagttgccactgttctataactcaaaattaggggcaactcctgctggcctggaattgtgtcgtaaggaaattgacttattatgaatgctaatttagggggttcctggaaacactggatggccgtgattaccagaagagcaagaataccccgtgcctgcgtgtgctttttaaggaccagtttaacgtacaaatgtgaagatattatattcactttaaggaactttttattctttggtgactcctacttcctgctgttacttaaagtctttgcttatagcattctgtcaacagatagtgaatgattttcaaatatttttaagcttgcaaattccatagactataaaatagacatttctcattaagaagtgtgatacctgattttgctgaaagtagaacatccttgggaaaatgccgtgtaatgattttcagctactccaaggaatgaatgagggctcctttcctaattttcatagacacttccattgtaaggccactcattctcagctttgtgtttacctccagggaattacttttccatgggacagaagctcagagcttgttagccacaaccctgtttcttgagctaaaatgtgatattctggtttatttgatttttaggaaagtgtaagttttatttcaggtaaaatagagacttaaaaacagtcaagttacaacaggaaatgaggtccttatagccactgcctaccttttgctagtggctcgactgtgatgatttcactgctgttgcctcttccggctgaagtaacagccaccacccagacgctgtactgacgattcctactcaggttgggaattctgtaggaaaacgagtcgggagaggcctcaaactcgctgatcacctgtaaaaagagacataagtgttcccacattcaaagaagcatgtggcaaaaatggatttcccgaaggaatggtcatgaacatattaaatatcataacaaaaaaactcaactcactctcctctaaaaggctggctttgcaatataaaatgtaactggtaagtttaagtgacccaccatctacatttttctctgcagcagctttgatggccaccaataaataatttacccctttacattacaggccacagcacttctgtatttggctgagatggagtaacaagaaccagatttaccctcccacctgaaacaactgaggaacacacaccatccataaaacaatggttctaaaagcattgcacatcaggtaataaatgacagtgatctctgaaagatgggaaacgaatgaagaaaaccccacaatcgcagagattttgcaatttgtagggcagtgtaaattttatttctgataaaatagagagctccacctcctcaactcgggaggttggcagcctttccaagctaaggaggcagagctgagagcctgaaggaagctagagttcacaaggaagagcactggaaagagagctacacacaaaggacaagctctggagattgaagagggtcctacttgggtattcagctgagcagatccatggatgcatgtgaggaaactacccaaggccagggaaagacacctgaaagaattggaggtcacggtgcctaatgctcacacagggatgggagtagtggctgttctcaccagttgggttggaaaacatcaagattcctcgagcattgggtatagtgcataagggtcttaccacaaaggggaaataattagccccaggctgaataccactccagtctttcctaattattcttaaaggcaagacttagagagaacaaattattcctaaataacttaactacatccaagaataaaggtcaagaatatttatagaatttatagaaattgaagcatgtagtactccaaaaggtgaagttcacaaagtttaacacctactaaaatatttccacaaacaaatagcccaaatatgtgtcacctgatgactggataaacataatatgtcacagcgataccatggagtctgtattagtccattttcatgctgctgataaagacatacccgagactaggtaatttataaataaaaagaggtttaatggattcacagttccacatggctggggaggcctcacgatcacggcagaaggtgaaaggcatgtcttacatggtggcaggcaagaaagaatgaggccaagcaaaaggggttcccccttgtaaaaccattatatctcaggagacttattcactacgaggagaacagtacagaggaaactgccctcatgattcaattatctcccaccaggtctctcccacaacacatgggaattatgggagctatataattaaagatgagatttggctggggacatggagccaagccatatcagagtgttatgagataatagaaaggaatgaagtactgataaatgctataacttggataaatcttgaaaacattatgctaagtgaaaggagccaattataagaaaccacacatttgtgattctcttcatttaaaatgttcagaataggcagatcgatggcaacatagattagtggttgtcaggggcagggtaggggaaggggaaaattgggaatgactgctaatgggcgtgcagtttcttttcagggtgatgaaaatgttctaaaattagatagtggtaagggttgcataactctgtgaatatactaagagccactgaattgttgaagttaaaagtgaatgacatctcaataaagctgtcataaaaatttccaggaaaacataattcataagaagaaatcaatcaatcaaaattcacccataattggcacagacattagatttatgcaaacaagggcaataaagtagttataattgtattatagcggtattataactgtatatgttcaaaaatttaagtagatatgatacaaaaagacctaaattaaactcaaaatgaaactataatgcatgaaataaaaaatacattgaacttgattagcagcagcgtagatattgcagaaaaactgattagtgaacttaaaggtgtggaaggaaaataaatattggggcccccaaatcactaagctaaagggaaaagtcaagctgggaactgcttagggcaaacctgcctcccattctattcaaagttatccctctgctcactgagatagatgcatatctgatggcctcctttagaaggctaatcagaaactcaaaagaatgtaaccatttgtctcttatctacctaggacctagaagccccctcctcacgagccccctccccactttgagttgtcccgcctttgcttcaagttgtcctgccttttcagatggaaccaatgttaaaaaattggttgatgtctcatgtctcgctaaaatgcataaaaccaagctgtgctcggaccaccttgagcacatactgtcaggacctcctaaggctgtgtcatgggcacgcatcctcactttggcaaaataaactgcctaaattgactgagacctgtctcagatatttgaggttcacaacacatattaataaatgatacatagaaaagagaataaaaaagttaacagggcattagtgagctatggaaaaatatcaggctgcctaacatgcacatagtggagttcctaaaggaggggagagagacaggaccaaaaaaaggttgtaaaaatagtggttgaaaaatttccaaatttgatgaaaactgtagcccgcagagccaagatactcagtgaattctagccacaagaatattaaaaaaaaaaactgtaccaaggagcatcataatcaaactactcaagagttttagtttcagtgctagagagaaaatcttaaaagtagccagagaaagtaaatgttgtgtaaaggggaacaaagataagcatggcagccaatttcatttgaaaaacaatcaaggtaagaagacagtggaatgatttctttcaagtactgaaagaaaaaaatcaacctagaattctatattcaacaaatataattcaaaatgaaagtgaataaagacttttttcagatacataagaagctgaaagaattaatcaccagtagacccacattacaagaaatgttaaagaaagtccttccagcagaaggaaaataataccagatagacagagacataaatgtacacaaataagtagaaaaaggaggtaattatacagatacatatatatggtatttcttatttaaatattattaaaatatggttgatagttaaaaacaataccaatgtaatgtgggtatataatataaataaaagtaaaatgtttaacaatagcacaaatgttgggaggaaaaaatggaagtatatgattgtaagtttcttatactatatgcaaagtgtgtaataccgcttgaaagtacactaagatgttaaaagtatatgctgtgaattgtaaggaaactgctgaaattacaaaatatagcataaaataaagctaatgaactaataagataaataaaatggaattacaaaaaaaaccccaaagaagtcagagaaagactgacaagggcaacaagtagcacaacagcagcagaactcaaatagcaaatagcactacacagagttaaacataaacatagtaataataattttaagtataaatgatctaaatatattaaaggcaaagattgtcagacctgatataaaagcaatatccgactatatgctgcttacaagaaatgtacttgaaataggccaggtgcggtggctcacgcctgtaatcccagcactgtgggaggccgaggcaggtggatcacgaggtcaggagattaagaccatcctagccaacgtggtgaaaccctgtctctactaaaaacacaaaaaattagccgggcgtagtggtgggtccctgtagtcccagctactctggaggctgaggcaggagaatggcatgaacccaggaggcggagcttgcagtgagccaagattgtgccactgcactccagcctgggtgacagagtgagactctgtctcaaaaaaaaaaaaaaaaagaaagaaagaaagaaagaaagaaagaaagaaagaaagaaagaaagaaagaaagaaagaaatgtacttgaaatataaaaacacaaataggttaaaaataaaggaacttaagtgatatcctatgataacactaatcaaaaaaatatggaatggctatagtaatatcagacaaaatagatttaaaagcaaaggatattaccagtaataaagacagaaatttcataacgataatggggtcagttcatcaagagaacataacaattctaaacatttattcacctaatattcacctattattcaaagatatgaagcttggttattaggtgaataaacgtttaggatttattattacatgaaacaaaactaatggaacttcaaggagacatagacctagataggtcagaattgttccttaaaaagccatgtgaagtaggtggagctggatccattttatagatcaggaaactgaggttcagagaaagtaagtgattcactgatgtcacaagaccagacaactgcagaacaatggctccagctcagggcctctggtcccaagtctggtgctatttcctcacactttatgctgtcaattagaagtgaccaaaacaagaaggacttacttttactcttgttagcttttcaataaaccttacatgcctcagcaggctgcataagttacaataccagtcatgcaattaaacaggggatttaaatcttcactatatctcttaattgtcatacaacctcatgcttcctcaacaaaacataatgtcagataattacttattgtcaaaactttaatttgtgggtacacagtgtcagatgatttggagagactcttgcatggattccctagatacatcactataatctagcatgcacgtgcatgtgtatgcactcatttacacctcacctccacccccctcccactacaacactccagtcacgtcttagagtattatgggaaaattagtccctctagaagttcagagggaatttggcctgtttcctgataaaccaaagagacaatcctgagactgtatgtacttgcattgtgtgattctccaaggctatgtcattgccaaattaattttacaaagcttaatgatgtgcaaattctaacaattactcttactgaacattaagcatcaggaaagcattaagatatatttataaaataaagatctttttctgtgtagacaacatagcttttagttaaaactccatacttatcctgttgacaaggtaaaattcgttcttgattacctccaaaacacacactttaatttttgcctgtaacataatgcatggctaaaatcaacaataaaatatgactttttatgcaacaagatttgtttcatcatttatatagaagactaatcaagaattgaagtaaaaaaggtatattcatagaaacttccttaatttctccgtaggttaggatgaaaaataataacgtcaagctgttagtggctcctattggttatttgggtaagttagttacactgatgtcaccaccctttgatgccactgtgtattcctctgaggactgccataattaggcacaattttcctggtcttagtagaagggcaagcagaaagttgataactgaacaatttaaaccatcagagttgatttattttctttggaatatatgtaactggatattaaagttgactcttcctgttctctggaagttttagcgatgatcttaaagcgtgagaatgctcctaaagatgccagtgccttctttcctaacaagagctgtgaggccacctgggcaggacttgctggttctcatgttttgccagtcatccatttccaggctccaaaagaggctggggcaggaataaggattttctgttgagagaggtctgtgagtattccctcttatgggtggaagagggctttgagctctagggaatctctcggagaacttggagtctgaaggacacagagcttggtaagtgagccacacctgagaaggctaatggcgaaccacagtggcagaggttagccctgctcacaacaggagaggaggctgggctggactggccacgcctcctagagtgaagcagggtaaggatgcctactggttgaccctagaggacagagcaagcctggatgtcttgagagagagaaccataggcatgaaatgcctccaacagagggatgcagtgtaaattatatagtatttattgtaaacagaatcattagctatggatggtgcataactcaatcattattaaccattttaacagtaggtaggagaaaaaagaaaaaaagagcaaaatgggaagaaaataaccagaagttctctcagtgtagtggagccaatctagttgattaaatcctttttaatgctcagccaaaaatgcttgttctgaaaagaagggatgataaatatcatctccttttgaaatatttccctccatattttattaagttaggatagcatggactatatttatatttcattaattttctttttattggataccagattttccaacacaacaatccaatagtgtgtaaactgacttgctaatttctacatgcatattttattacgtagcactctcttccaaatatagagaatgttcaatgagaagggatcactttgatttccagatttcgcctgatatatcagctgggttgctatttcagagactctgaatcttttttttttttttttttaaagaaacaaagcaaagcttcgctatcaaggacaacagataaacactgcggtataaagaagggcaaactcacaatggagtttcttagggattaatgaaccaaatgtggcaaaaggagaaatctgtggggaagcaacagagacacttttcttaatatttaaatatttcattttcttcaggtagactttgaactctccagtctcatcttctttagagttaagacagacgtgtcagtcatcctagattttgttatgcctaaagtgtgaattaattttgagtggactacagtaattgtgctaaccatttgtttgaagagaagacataagagttcctttgtgacctgtggaaatacagaaacagccaacattacgaagttgccgccaggcatggacttgagggatcccatcccccatgtccctgaaccagaatgccagggattcccttccatggcttatttttaatcctgctctgtctatgcccagcttgaggaagtggatgggacatttgtggactggggttgccaattattttgcatctgtcatatattcctcttggctagctgaggaaaaagcctgttatttctcatctaaaatgtgtttaaacatgtaggctctatccaagttgagaagcaagccaacatttattattaattaatcacttctcaattgaaaggctctaagtggctgccaagttactgatttcttggtccaccagataacatggtggcatgagaagaacagggctctctctggctcagcggtccccagcctttttggcatcagggacagatttcgtggaagacagttttttttttcacagatggatggacgtggtaggatgggatggtcttgggatgaaactgtttcacctcagatcatcaggcattagttggattcccataagaagcatgcagtataggtccctagtattagtccgtagcccgggggttggggaatcctgctctaccgatgtcatgtaacaggggcaatccacagtgttcttaggggaagatttgggtatttggtctgaggacacacacataaaatgtaaaatatgcatgttgcttatgtaatgaaccatctcaaatactattcttacagtgggctggtcatggtttttactgtgggaggtggtgggggggggtccaggcagacactgctgccttcaaagtatggaggtctgtggataagggatgttggcgagagttataggaccccatgagccagacatagaagcttgttggactatcgttctctcctttgggctgtgggaagaaaatctaggcaaaagttcttagcttcatgcctcgtaataggaagggcttgtaaataattactgagtttcaattaatggtcatttactgagttcagttgcagtgtgtagattataaggcaagttcctgcccccggggagcaagaagtgaccacagcttggcaaacagattaatttaaaatgaggcaccatagaagtctgaccaattcctactaaaatttagatataaactcgtttgaacctttctctaaaaccaaccctgtcatagttgaagacatggatgaatatttataagatgcctaaaaaataaatggaaacttcatatatttgttttaaaaaatatttatagcaaggttttacaagacttctgacatgtttgcctccccaaagccgtatccagagtggaaaatacagtaaatgggataaatcttgtgacacccaagccagagcgttcacatttcaagcgttttgtctttgtatgttactgctttaggtctgctgggtagagtcgtgggttcctaaggaactaaatgtgcacagtttactcttccagtcaaaagagtgtaagggttgtgaggaagttagttttctcctagtgcttcagggtcaactcatggaaagcctgggaacagcgtcttctagacctgccttcattccacaattattgttgccttgtggtgttgatataatatttttcttttcatgtgtaagatgcttttgaccagtaaataagatataattagccacagtgaggcactttaaacactctttggtcatgtctataaaactagacgtttacccaataattgccaaattcatttccgaacccctcacattacttagcttgtagctgcacttgtaagaccttgcagagccttctctagtcctctcaatcaggggctaagtctgccctttgtctttcatagcctttgcctttattccactgtgggttatggtcttgcatgtgcttactgcatctccccaggggtcaggctccccgacccatccctctactccttttactcacccatccctctactcactctgcagggaacctggttcagagcattgcttagagctgggactcaatgaccagtaactggaatacactgaagaaattcttgttgtactaggtgagtttagtaatgacctagaaatgatttgagtacgataggaaataatgaggataaaatgactacaaagccataggctgttcatgtcaaactattcagcctgtctgatataaaaggaattctacttttaaaaatttcaattaactttttaatgaaaaactaattctataaggaaatgtgatgttttaaaaagctctgatagctaattgttaacatgcaattaaaaaaacttgaaggctgtgatttcatagatagaatgtccacagcagtgaaaaaaaaactcccccaagcaataaacaaaattgatagctcttttaattatagggtaagggaacttttagaatgcttaacatcttcttgtttagtggcaaagaaatggcctggattccattaagaattagcagttcactgcattaatttaagatttttaaaattcttatgtataatatattttgatctaatttccattttatttcacagttcccatctataaaagaagatgtcatggcagaaagatcttcctaaaggcataggttgagaggccaacattggtagaaatgggataacagccaggcaattctggtagtttcctctgcctttcactgagattactgtagataccattacatatatgactatatatatgactatatatagactatgtatataactatatacatagactattggctacttttaaaaagcctttcaaatataaaatattttatatatgaccatatatatatatatgactatagataccattatatatatgtctatatatatgactatatgtagactatatatataattatatacatagactattggctacttttaaaaagcctttcaaatataaaatattttatttttggccttccaaatataaaagttattgctataatgttttgcaactatattaaagttgatatccagagaaggcatgagaaaaactagtttcttgatgtaattgtttagaattagaagcaccatccaattagcccaggtggcattacagatacttatgttaacaggctctttccaaccgatataatctccctttgctacaatttttcctcatccccttttcattgtcataccacctgccatgaaaattatctatctgtcaaagttacattattaatttaacttgattgctgtcacctattcaacaaattctgtacaaaaaaactaatttgttatcatatagtttctcacatacaagaaattaatgagaaacacaattcttagtaataaaaataatatatgcagaatttacaaaattgaaaaaaatagctctttccactagtgttaattgaaaaatgatttaaagccaatttatttccttaaatagtacaatatgtctgtgtcaggccaagtcaaaaagataagatgttttcaaagctgcaatcttccaaaagctccaaaagctaattgataaaaagggcattttagcaaaactttggagacagtaaaaagatcagaggttaagagggtgggatgaataggaggagcacagagggttttcagggcagtgaaacttctgcatgatgctataatggtggatccatgtcatcaaacatttgtccaaacctataaaatgtacaaccccaagagtaagtcttacataaactatgaacactggctaataatgatgtgtcaatgtaggttccaccattgttacaaatgcaccactttattgggggatgtcgatagtgggggaggctgtgcagtaggggcaggggcatttggaaaatctctgtaccttcttctcaatttttctgtgaacctaaaactgcttaaaaaataaagtcaagttttttaaaggcattttagcctgtggataatcagaaagctctacgcagcaatggggaagtacattcagggtggcatacactaagctacctagtctgaatgaatgctacctcaaagctagaatgcttagtgacaggttatctgacaaatcaggcaggcagtcttatgagactgagcttcaaaagagatttccagggcctctttctgtatgaaaattttaggggagtatatgcttaagttttctttgctctataaattacatgattgggctcagaattttaaaggccaagatttctaccttgagtataggccatctgcattttaccagttatagcaattgaatgatttcacataatgcctagtggacaaacaaccactgagaacaatatgagaagaaaactgaaatatagcttcaacagaaagattgagtagttattggcttgttcactgtgtgatatgggttggctgtgtccccacccaaatctcatcttgaattgtagttcccacaatccccatgtgccgtgggagggaccccgtgggaggtaactgaatcatgggtgtggttaccctcatgctgttcttgtgacagtgagtgagttctcatgagacctggctttataaggggcatttcccgccttggttctgcacttcctcttgctgctgccacgtgaagaaggacatgtttgtgtccccttccaccatgattgtaagtttcctaaggcctccccagccatgctgaactgtaagtcaattaaacctctttcctttgtaagtcactcaatcttgagtatgtctttattagcagtgtgagaacagacactgtgaataggataacagggaaaaaagaccactattaaatgataaacttataaaaaacaacatcgacttcccttccactttcttaaagaatagaagtcaaataaataggcaaaaattgcacacaaaaaactgagaagatttagaaccacattccatatctattgagataatcatgtagtttttgtctttacttctgtttatgtgatgaatcacatttattgattgagtatgttgaaccaaccttgcatcctgggaataaagcctacttgatcatggtggataagtgtattagcccatttttatactgctatgaagaaataccagagactgtgtaatttataaagaaaaagaagtttaatggactcacagttccacatggctggggaggctttaaaatcatggcagaaggcgaaggaggagcaaaggcatgttttacatggtggcagacaagagagggtgtgcaggggaactgctctttataaaaccatcagaactcatgagacttattcactatcatgagaacagcacaggaaaatccgcccccatgattcaattaccttccaccgggtctttcccatgacacatggagaaaatgtgaggtacaattcaagaagagatttgagtggagacacagccaaactatatcaataagctttttgatgtattgctggattcagtttttcagtattttgttgagatttctgcattgatgttcatcaaggatattctcctgaagttttcttttttgtcatatctctgccagatttgggtatcaggatgatgctggcctcatagaacgagttaggaaggagtcccccctcctagattttttggaatagtttcaataggaatggtaccagctcttctttgtatatcttgtagaattcagccatgaatccatctaatcttgggcttttttcatttggtaggctacttattcctgcctcaacttcagaactcattattggtatgttcggggattcaatttcttcctatttcagtcttgggagagtgtatgtgttcaggaatttatccatttcttctaggttttctagtttatgtgcatagaggtgttcataatattctctgatggttgtttgtatttctgtggggccagtggtaacatcccacttatttattctgattgtacttgtttgaatcttgtcactttttttctttattatcctagctagtggtctatctattttattttttttttcaaaaaactagctcctggatttgttgatccattgaatggtttttcatgtctctatctccttctgttcagctctgattttgattatttcttgtcttttgctagctttgggatttgtttgttcttgattctctagttcttctagctgtgatgttaggttgttaacttgagacctttctaactttttgacgtgggcatttagtactataaatttctctcttaacactgccttagcagtgtctcagagattctggtacattgtatctttgttcttattagtttcaaagaacttcttgatttctgtcttaatttcattatttacccccaaagtcattcaggagcaggtcattcaatttccatgtaatttgtatagttttaagtgaatttcttagtattgattttgaatatgattgtgctgtggtctgagagactgttacgacttcagttcttttgcatttgctgaggagtgttttacttctgattaatatgatcaattttacagtaagtgtcatgtagcaatgagaagaatgtatattctgttgtttgggggtggagagttctgtaaatatctttcagatccatttgagttctgtagatatttatcaaatccatctaattcaggacctgagctcaggtcctgaatatctttgttaattttttgtctcaatgatctgtctaatattgtcagtggggtgttaaagtctcccactgttattgggtgggagtctaagtctctttgatggtctctaagaacttgctttatgaacctgggtgctcccgtgttggatgtatatatatttaggatagttagatcttcttgaattgaaccctttaccattatgtaaaatataggatgatgtaaacttaggacagttagatctttgtcttttttgttctttgttggtttaaagtctgttttgtcagaaactaggattgcaacccctgcttttttctgtttttgatttgcttactggattttcctccatccctttattttgagccaatgtgattatctcaaatagatgcagaaaaggcttttggtaaaatccaacatccattcatgttaaaaactctcaataaactagttattgaaggaacacacctcaaagtattatgacccatatatgacaaacccacagccaacatcatactgaatgggcaaaagctggaagtattccccttgaaaactggcacaagacaaggatgccctctctcaccactcctactcaacacagtattggaagttctggccagggcaatcaggcaagagaaagaaataaaaggcattcaaacaggaagagaggaagtcaaactatccctatttgtagatggcatgattccatatctagaaaatgccatcatctcagcccaaaagcttcttaagctgataaacaacttcagtaaagtctcaggatagtgcgaaaatcactagcattcctatcctctaacaacagtcaagctgagagccaaatcaggaataaactcccattcacaactgccacaaaaagaataaagtaccttggaatgaagctaactaggatggtgagagatccctacaaggagaactacaaactactgctcaaagaaatcagagatgacacaaacaaatggaaaaacatttcatgctcatgaataggaagaatcaatatctgaaaatggctatactacccacgcaacttatagattcatgctattctcattaaactaccattaagattcttcacagaactagaaaaaactattttaaaaattcagttggaaccaaaaagagcccaaacagccaaggcaatcctaagcaaaaagaacaaagctagaagcatcatgctactggacttcaaactatactacagggctacagtaaccaaaacagcatggttctggtacaagaacagacacatagaccaatggaacagaataaagaacccagaaataagactgcacatctacaactatctaatcttcaacaaacctgacaaaaacaagcaatggggaaaggactccctattcaataaatggtgctgggataactagctagccatatgcagaagattgaagctggctcccttccttacacgatatacaaaaatcaactcaagatggattaaaaaatgtaaatgtaaaacctaaagctaaaaacactctggaagacagcctaggcaatactattcaggacataggcatgggcaaagatttcatgatgaagacaccaaaagcaattcgcaacaacaacaaaaatggacaaatgggatcaagtaaatgaaagagcttctgtgcagcaaaagaaattatcaacagagtaaacagctgacagaatgggagaaaatttttgcaaactatgcatctgacaaaggtctaatattcagcctttataagaaacgtaaacaaatttacaagaaaaaaataaacaatccgataaaacgtgggcagaggacatgaatagacacttttcaaaagagaacctacatgcagccaacaagcataggaaaagctcaacatcactgatcattagagaaatgcaaatcagtggtgtggagccaagatggcggaataggaacagctccagtctacagctcccagtgtgagcgacgcagaagatgggtgatttctgcatttccaactgaggtaccgggttcatctcactggggagtgtcggacagtggacgcaggacagcgggtgcagcgcaccgagcatgaggcaaagcagggcgaggcatcgcctcacccaggaagcacaagggttcaggggattccctttcctagttaaagaaaggggtgacagacggcacctggaaaatcgggtcactcccaccctaatactgcacttttccgatggtcttagcaaacggcacaccaggagattatatcctgtgccttgcttggagggtcctatgcccacagagcctcactcattgctagcacagcagtctgagatcaaactgcaaggtggcagtgaagctgggggaggggcgcccaccattgcggaggcttgagtaggtaaacaaagtggccgggaagctcaaactgggtggagcccaccgcagctcaaggaggcctgcctgcctctgtagactccacctctgggggcagggcatagccaaacaaaaggcagcagaaacctctgaacacttaaatgtcactgtctgacagctttgaagagagtagtggttcccctagcatgcagctggagatctgagaacagacagactgcctcctcaagtgggtccctgacccccgagtagcctaactgggaggcacccaccagtggggcagactgacacctcacacggccaggtactcctctgagacaaaatttccacaggaaagatcaggcagcaacatttgctgttcaccaatatccactgttctgcagcctccgctgctgatacccaggcaaacagggtctggagaggacctccagcaaactccaacagaccttcacctgagggtcctgactgtcagaaggaaaactaacaaacagaaaggacatccacaccaaaaccccatctgtacgtcaccatcatcaaagaccaaaggtagataaaaccacaaagatggggaaaaaacagagcagaagaactggaaactctaaaaatcagaatgcctctcctcctccaaaggaacgtagctcctcaccagcaacagaacaaagctggatggaagatgattttgatgagttgagagaagaaggcttcagatgatcaaacgactcagagctaaaggaggaagtttgaacccatggcaaagaagttaaaaaccttgaaaaaaattagacgaatggctaactagaataaccaatgcagagaagtccttaaaggacctgatggagctgaaaaccacagcatgagaactacgtgacgaatgcacaagcctcagtagctgattcaatcaactggaagaaagggtatcagtgatggaagatcaaatgaatgaaatgaagtgagaagagaagtttagagaaaaaagaataaaaagaaatgaacaaagcctccaagaaatatgggactatgtgaaaagaccaaatctacatctgattggtgtgcctgaaagtgacagagagaatggaaccaagttggaaaacactctgcaggatattatccaggagaatttccccaatctagcaaggcaggccaacattcaaattcaggaaatacagagaacaccataaagatactccttgagaagagcaactccaagacacataattgtcagattcaccaaagttgaaatgaaggaaaaaatgttaagggcagccagagagaaaggttgggttacccacaaaggaaagcctatcagactaagagctgatctctcagcagaaactctacaagccagaagagagtgggggccaatattcaacattcttaaagaaaagaattttcaacccagaatttcatatccagccaaactaagcttcataagtgaaggagaaataaaatactttacagacaagcaaatgctgagagattttgtcaccaccaggccggccctaaaagagctcctaaaggaagcactaaacatggaaaggaacaaccagtaccagtcactgcaaaaacatgccaaattgtaaagactgtcgaggctaggaagaaactgcatcaactaacgagcaaaataaccagctaacatcatgatgacaggatcaaattcacacataacaatattaactttacatgtaaatggactaaatgctccaattaaaagacactgactggcaaattggataaagagtcaagacccatcagtgtgctgtattcaggaaacccatctcacatgcagagacacatataggctcaaaataaagggttggaggaagatctaccaagcaaatagaaaacaaaaaaaggcaggggttgcaatcccagtctctgataaaacagacttgaaaccaacaaagatcaaaagagacaaagaaggccattacataatggtaaagggatcaattcaacaagaagagctaactatcctaaatatatatgcacccaatacaggagcactcagattcataaagcaagtccttagagacctacaaagagacttagactcccacacaataataatgggagactttaacaccctactgtcaacattagacagatcaacgagacagaaagttaacaaggatatccaggaagtgaactcagctctgcaccaagcggacctaatagacatctacagaactctccaccccaaatcaacagaatacacatttttttcagcaccacaccacacgtattccaaaattgaccacatacttggaagtaaagctctcctcagcaaatgtaaaagaacagaaattataacaaactgtctctcagaccacaggtcaatcaaactagaactcaggattaagaatctcactcaaaatcgcttaactacatggaaactgaacaacctgctcctgaatgactactgggtacataacgaaatgaaggcagaaataaagatgttccttgaaaccaatgagaacaaagacacaacataccagaatctctgggacacatttaagacagtatgtagaaggaaatttatagcactaaatgcccacaagagaaagcaggaaagatctaaaattgacaccctaacatcacaattaaaagaactagagaagcaagagcaaacacattcaaaagctagcagaaggcaagaaatagctaagatcagagcagaactgaatgaaatagagaaacaaaaaacccttgaaaaaatcaatgaatccaggaggtggttttttgaaaagatcaacaaaattgatagaccgctagcaagactaataaagaagaaaagagagaagaatcaaatacacccaatacaaatgataaaggggatatcaccaccaatcccacagaaatacaaactaccatcagagaatactatacacacctctatgcaaataaactagaaaatctagaagaaatggtaaaattccttgacaaatacaccctcccaagactaaaccagaaagaagttgaatctctgaatagaccaataagaggctctgaaattgaggtaataattaatagcttaccaaccaaaaaaagtccaggaccagatggattcacagccaaattctaccagaggtacaaggaggagctggtaccattccttctgaaactattccaatcaatagaaaaagaggaaatcctccctaactcattttatgaggccagcatcatcctgataccaaagcctggcagagacacaacaaaaaaagggaattttagacctatatccctgatgaacatcgatgcaaaaatcctcagtaaaatactggcaaaccgaataagcacttcaaaaagcttatccaccatgatcaagtgggcttcatccctgggatgcaaggctggttcagcatacgcaaatcaataaacgtaatccagcatataaacagaaccaaagacaaaaaccacatgattatctcaatagatgcagaaaaggcctttgacaaaattcaacaacccttcatgctaaaaactctcaataaattaggtattgatgggacgtatctcaaaataataagaactatctatgacaaacccacagccaatatcatactgaatgggcaaaaactggaagcattcccttgaaaactggcacaagacagggatgccctctctcaccactcctattcaacatagtgttggaagttctggccagggcattcaggcaggagaaggaaataaagggtattcaagtaggaaaagaggaagtcaaattgtccctgtttgcagatgacatgattgtatatctagaaaaccccatcgtctcagcccaaaatctccttaagctgataagcaatttcagcaaagtctcaggatacaaaatcaatgtgcaaaaatcacaagcattcttatataccaataacagacaaacagagagccaaatcatgactgaactcccatttacaactgcttcaaagagaataaaatacctaggaatccaacttacaagggatgtgaaggacctcttcaaggagaactacaaaccactgctcaacgaaataaaagaggatacaaacaaatggaagaacattccatgctcatgggtaggaagaatcaatattgtgaaaatggccatactgcccaaggtaatttatagattcaatgccatccccatcaagctaccaatgactttcttcatagaattggaaaaaactactttaaagttcatatggaaccaaaaaagagcccgcatcgccaagtcaatcctaagccaaaagaacaaagctggaggcatcacgctacctgacttcaaactatactacaaggctacagtaaccaaaacagcatggtactggtaccaaaacagagatatagaccaatggaacagaacagagccctcagaaataatgctccatatctacaactatctgatctttgacaaacctgagaaaaacaagcaatggggaaaggattccctatttaatatatggtgctgggaaaactggctagccatatgtagaaagctgaaactggatcccttccttacaccttatacaaaaattaattcaagatggattaaagacttaaatgttagatctaaaaccataaaaaccctagaagaaaacctaggcaataccattcaggacataggcatgggcaaggacttcatgtctaaaacaccaaaagcaatggcaacaaaagccaaaattgacaaatgggatctaattaaactaaagagcttctgcacagcaaaagagactaccatcagcgtgaacaggcaacctacagaatgggagaaaatttttgcaatctactcatctgacaaagggctaatatccagaatctacaatgaactcaaacaaatttacaagaaaaaaacaaacaaccccatcaaaaagtgggtgaaggatacgaacagacacttctcaaaagaagacatttatgcagccaaaagacacatgacaaaatgctcatcatcactggctgttagagaaatgcaaatcaaaaccacaatgagataccatctcacaccagttagaatggctatcattaaaaagtcaggaaacaacaggtgttggagaggatgtggagaaataggaacacttttacactgttggtgggactgtaaactagttcaaccattgtggaagtcagtgtggcgattccttggggatctagaactagaaataccatttgacccagccatcctattactgggtatatacccaaaggattataaaacatgctgctataaagacacatgcacacgtatgtttactgtggcactattcacaatagcaaagacttggaaccaacctaaatgtccagcaatgatagactggattaagaaaatgtggcacatatacaccacggaacactatgcagccataaaaaaggatgagttcatgtcctttgtagggacatggaagaagctggaaaccatcattctgagcaaactatcgcaaggagaaaaaaccaaacgccgcaagttctcactcataggtgggaattgaacaatgagaacacatggacacaggaaggggaacatcacacactggagcctgttgtggggtgcggggacgggggaggaatagcattaggagatatacctaatgttaaatgactagttaatgggtgcagcacaccaacatggcacatgtatacatatgtaacaaacctgcacgttgtgcacatgtaccctaaaacttacagtataataataaaaaaaaagaaatgcaaatcaaaaccacgatgagatatcatctcacaccaggcagaatgactattattagaaagccaaaaaataacagatgctggtgaggttgtggagaaaaagggatgctcatacactgttgatgggagtataaattagttcaggcattgtggaagacagtgtggcaactcctcaaagacctaatgacagaaataccatttgacctggcaatcccattactgggtatatacccaaaggaatagaaatcattatgttataaagacacatgcacacatatattcattgcagctctattcacaatagcaaagatgtgaaatcaatctaaatgcccatcaatgatagactagataaagaaaatgtgataaatatacaccatagaatactatgcagccatgaaaaagaacaagatcatgtcctttgcagagatggatggagctggatgccattattcttagcaaactaacatggaaatagaaaaacaaataccacatgttctcacttgtatgtggtagctaaattatgagaacatacacacacatagaggggaacaacacacaacacaacaacaacacacacctttcagagggtggagggtgagaggagggggaggatcaggaaaaactactaatgggtattaggattaatacttgggtgatgaaataatctgtaaaacaaacttttgtgacacaagtttacctatataagaaatctgcacgttacccctgaacttaaaagtgaaaaaataacgaactgcattccattagaactagccgtgaaataaaaagatatttccaagaaagcttcaggaatagacttcccaagaaattttataaaaccagaattgattttcacatgtctgggatatttagatgtagccttgcctcaaagaaacccttcgaggttttttccagccgtatgattccatgacaggatgctggggctacagtaatccttggttgatccaagaacatagagagcctagcatctgcctgccatgtagaagcactgcacaaaggtctcatgtatatgattcattacatgtgcgtaaatggaatacaattgtctatttttaggccaacttgtggtatctccataattttcagattttccattattaaaaaaaaaaaaagagagagattcgaccgggcgcggtggctcacgcctgtaatcccagcactttgggaggccgaggcgggcggatcatgaggtcaggagatcgagaccatcctggctaacacagtgaaacctcatctctactaaaaatacaaaacattagccaggcatggtggcgggcgcctgtagtcccagctacttgggaggccgaggcaggagaatagcatgaacccgggaggcagagtttgcagtgagccgagatcgcaccattgcactccagcctgggtgacagagtgagactctgtctcaaaaaaaaaaaaaaaaaaaaaaaaaaagattcatccttaagtcatttaaataaaatgatggaagaatgatttctatgtaagtgatttaaaagcacaggcacttgatccaaatccttctgggatacaaagcatcccaaagtacataacacaatttcttgccttattaagctacagcttcattacacaatttaacctcttttagatgactcacagtcatcatctataaaatttaattcaacacacatttgaggaacatccactatttcagcacaataccaggtttgccagtctatgcccatgtctaacaataacgcaagagattgtggttatgtcaaagtgaggttgaaagtcagtgctgggagtactggggcaggatggaactgggatcccagggaaggcaggtaagcatgaggacaaagagctcagcccgctgtgggttgcagatcccatcttcctttgctaacctgcgtgaccctggccagattgcagagtcttcatttcagtatcactgagtgaagataacaatcataacacctcctgcgtaaggtagtcaccagaattaactgatgcaaaacagtatttttaaaaatgtgagtcataggaggaatttaatggaacatgacaatcactttaaaaacaaaatgaaatagaatagaaaaaaagtcaaatggaacagaaaatatcggagggcatcacgtgtagtaaatgtaagtttgtggtgtgcgagtactttcgtggcgtgattataacttatattttctatcgtgggtcaccatagggcaagttcaaaaaccataggtataaagcttttggcactcggtgcctaatgtgtagccagtgataaaaagtggtgaaataaaaatacagcatttaagttgagctttaaacaataaacatttttaccaaagaggatggaatggaaaaggtaagaaaaacccaatacgtgtacacacacacacacacacacacatacacacacgtgcacaaatgcagacacatatgagacatggtattacttagatattggatggaagaaggtttttagaatatgaaactagacaggagatgcagctggattgtggaaatctatctaggtcatattgagaattttgaatgtctttaggtaaaaactgcgaagtcatccaataaatttgcactaggaaataacatgctcagattcagaattggaaaaaggaattgtgacagggatgtggacaacagactgggagttgagcctggcagtgggaaggcttctgacttggttttgattctccaggggaggacctgaagcaaggcaatggcattgggtgtgaaaggaaggagattaagaagacattgcattgggaggccgaggcaggccgatcacttgaggtcagaagtttgagagcagcctggccaacatggtgaaaaccccatctccactaaaaccacagaaattagcctggtggggtggcgggtgcctgtaatcccagctactcaggaggctgaggcaggagaatcgtttgaacctgggaggtggaggttgcagtgagccgagattgcgccactgcactatagcctggcgacagagtgaaactccgtctcaaaacaaacaaacaacaaaaaagacattgcagagagctcttgtgacatgatgtcactttgctcatttatttcctctgatcatattaccctttcctgcctctgattcatcaggtaaaattcttctcttcctgcaagccagggctagctatgtgttccaagcaaccatctctggccgtatgtttgagtgacacccagtccgcgctcctgcactgtgctgtgcacatcattgctgtgtcctctgtcacatcacacagaagggtgacattgtctagtgtttcctgccttccctggaacttctgggtatgggtttggagcgtacgtcatggtccctttgtggttaagacatggaccagaatcttatgacagattctggctcgtgatttgtgcttggagcgtttacctgcctatgtcagcgcctcagagatttctttctctttgtcatgaaacctgcctgggtccttcctggagtgaagatagcatggcatgtactaccacatactcacaatgagcatgatcgtgaaagaaaaataaaaccattggttgttgtatggttgttgtaaatcactgaggtttcaggcctgtttgtgatgccccctaactcagcatctcttgattgatgtgattcagaacctggctcagagcttggtgtaagagtagtgctctatgtttatttgtggtaaaaatgaataaatgattaggagaggaactataggtagcttgaaggcttctggtcagaaggcagcagattttgttagatcgtaagctaaatcagaacacaggaaaagagggagacacaagtataaatgtgtttgtgggcacattgaatgcgaagtactggagaggtcttcctgagtacgcagatggtggtaagctggaaatataggactgacggttctctaagattgtcaggatagagataaaaaatgcgaactctttaatttcagatgatagttacattataagaacagattcaatgatccacagagatagtgaagaatattaagagataaaggaagaatattgggaaatgcctacatttaagggtgggaagcagagggacaagaagcaacaaagaataaaaaacatgataatggaagctaagagaaggaggattttaaaagcaaattgctatctagtagcgtcactatatgctacagtgacatgaaatagggagggtactgggagggaggaacgacgttttaatacagccaggaggtccgtgttccgtgtgagagaggaagaatgaacacagcgatgagtatcattgtagatacagatgagcacgttagatgctgctttccagattccacgttataccacttttccactccttgagattcctgcacatttctggttctcggaagtcccctttcgctctcagcctgactatggctttatttgatgcagtctgtggctgattgggaggcaaacacacacctgttgcctggggtgggaagctgtctggacctggtgagttactttgcctcccagaagacttgtttaattctaagttatgggctacaatgtggagaacttaattgcccaggtcttctgggtaagaagagtagtggtgtattctcactgattaactcagcaacatttattgagcacctactatgtacaggaactgaataacattatcatctgaagctggaataaccaatgtgaatcacagctcagagatattttatgccttctgatttttagttttcattaatgagaagtctgtgcttcctaattttacatttctaagctccgcaaatgagattagcattgtgaaacagacaatgtctatatcataatgcttatttaatgtgtatatagtaaaagcagtctgtttgtgaaagtttttcagactgcttttatgtagacgggagcgttggggaggaaatgaagcttggctgttttcttcctgggaccttaaaagggttatctcacgtctttggattttcattgcttataatagattgtttgatcattcaaaccactatatattaaaattaatagccagaatccacaaattatgtggatgaggctctgaatcaaatgacttttgagattttgcagtttgaatctctgattggggagtttaatatctcattgcactgttggacccccgagggaaagttcatgttcagtccacatcatctttagacaacctgtttgtagattcattctcagttaccctaacttgtcatctggccacatgcaagtttcaaattctaatgtctttttctaagctaaactgagagagcaccatgaaataaatgcctatcagcagacattatatgtcacatattagagaaaaaagcttgtctattttaacagggttctttcccaagaaggggagatgaatttgggatcttgagagaaaatgacatcagcgaggaggttagctgagggactcttataaaagggaccaaattacaaggcatattgtgtcctgatttatccccctatgttctacatttaactatgaaatcatttcaaagaaaaaaaaattcagatttatgagcaaggaaaatatctagagctcatactgtcctctggtggtcattcgcacacatagccagaaatgcaaatgccttggaaaacttgacagcatctagtttaccgactgaaagtcaaattgcagaaactgatgaaaacaaaacaaaacaaaaaaacaccctctttcctgtactttaaagtttcttgatcatttcatatttaaaacagaataatggatactatttacaagtattcacctctgaagagaaataattgtctctgagcttgactctcactgatactatttgatgtaaaaaataggtctcgtgctcttaaatgatggttgagatagatagacaggaaggtggatatggagagggaactgtttttagttcacttcacttcaattaagatgctctggggttctgggacctccttgtaacactttctaggtattatctcctggaagaacacaggcacctgcccatcatatttctatgtctctagtctttttaatatggtcaaaaggcaacacagagataccctgataaaaatctcagctgttatttcccacctttttctggtgggtttgctctcattactgtcttttttttttttttttttttttttttgagacagagtcttgctctgttgcccaggctggagtgcagtggtgacattttggctcacggcaacctccacctcccaggttcaagagtttctcctgcctcagctcctcccaagtacctgagattacaggcatgtaccaccacacctggctaatttttgtattttttgtagaggcggagtttcatacgttggccaggctggtctcaaactcctggcctcaagtgatcctcctgccttggcttcccaaagtgctgggattacaggcgtgagccaccgtgccttgctggccctcattactgtcccttttgagagtgtgttgttaagatcctgggcaggtcaaatcccattgttctgtgggtgaagagacaggagaaatcctggggaaatgcgtttctaccccatctaacaacacctgtgtgactttgttttcaggataggatgttttttcttccttttctattgtatgtaattcttaggccaggaggacagagccaaatacagcctgtatcatccacaaataggggctttctcagtaagcatcagtcactaaggactcatttcaagtaagccaggtagggatttttagtgcagagataaagataagatgattgagaagacaaaacgagaggaagctgctggtctttctataccctgctaggtgctttctagcctgttagagtcaaaagagcaaccgtgaatcccatagcaaagagatcaatgaatgaatgagtgaatactaatacagatgcaattcaagttctagtggaaaatgagtatactttatttcagcaataatttttgtctctctttggtgaatacgggacatgtcagtgataagcagaaaagcagaagccaccctgggcattgagggcacaatggctcagctttttttcagtgtctacgctgctctccatctctgggctttgatagtaggattcagtaagtgaggattaacagcatattgaaaaccacataagaagcccagaaaaatgttgtggagtctaactctgactatttacgtttacatattgacttcaagggcagagtactgccatgaatgcataagcagtagagaacacaccttgctttttcagcaacagacggaacttcatgggccaagcaagcccacacactctcacacactcactgttggggtacaccaggcctcaggggcacctgtggactctgagcttgggcaaacatatcaccttgattaaaagattaatccataaatttgtttgggaatatttttcagccctaacaaggaaggagattccatcgcatgctacaacatggatgaaccttgaggatatcatgtcaagtgaaacgagctggtcactaaatgacaaatgctatatcattccacatgcatgaggtccctagaggagtcaaatccagagacagaaagtagaatggtgggtgccatgggctggtgggagggaggatagggaattcgtgtttaatggggacagagtttcggttttgtagagttctggagatggatggtggtgatggcttcacaacaacgtgaaggtatgtaatactgatgaactcaataatcaaagtggtcaagagggtaagttttacgttatgtgtattttaccagaaaggaaacaaaaccagtgtgtatattcactcaacaaacgcttagtgaatgactacatgtgtcaagttctatgctgggagctggagatacaaagatggaagagacatggcacctgctgcagaaaatgtcataatgtttccatgaagacatcgtcaattttggtgggtcattttaatgttttcttttctttaaaatttccctttttgatatgttttggtgtggtctcagaagcagtctaactttataatgattattcagcaggaataatatgaacgataacaaaaaccacactttgaaatagtaaataacttttagttccttcacaatgaaccaggctgactgctgtaactgtaagggtaatagatcttcattaaagtccctcatttctagcacaatagggttttgcctgctattcttttccctgtgagagatggaggagggaaagaagggagggatagggtgggagggaaggaaggagggagggaaggagggagggagggagaagggagggagggaaggcgtgaagtgcttatcatgatgagtccaacagtaaaatcaataggtgttgtccactgactatcaattaaggcacaatcaaggcctctgggttttgattttgatcaggctgctggcagtttagtgggaactcaccaaataaacaataattccagacaattgtcccccttgtcatgattcaggagcgtattttcaaatgaggtgtaaatgaggactttgttttgtatgtggagacagcaggggcaaaacaaaaccactggaaagacccaggtaggtgggaaacaaaggaacgaaactgtccagtgcgagcacctgcagctcgtccctggcagacgcttgaaaggcacttggttatttaccaacttactgtgggataggggtgggagcagaatacagtgtactttcggatgatgccgttcagcttgagagggggaagccaggacacaaagaccatggaggctgaggccgccgctgccttcacacccgcgggaggacctggaactggaagagccgtgtgtttagtcacaaggtggggcctcaacttgggcttgcggacccacgcttcccaacatgaccccactccgcacttactgttcagctctttcaggatgagcgttatgggttccgctgtgtccccccaaatgcatatgttgaagtcctaacccccaggaccacagaatgacactgtaattggaggtagggtctttacagaggtaatcaagttaaaatgagtttgttagggtggtccctaatccagtacttctggtgtccttataaaaagggccagtttggacacagagacagacatgtatagagggaagatgatgtgaagacacagggagaagagggcatctataagccaaggagagaagcccaggacagatgcttgtctcaaagctcttaaagagaaccagccctgcagacaccttgattttggacttctggcctccagaactcagagacagcaaataaattcctaatgttggagtctgtggtcctttgtagctctaggacctaatacagtcagttctagtccctcttgtcctggggagtcttcccaacccatttcagcccctggcaacttcctgcctctggataactggagaattaacttctggatcagtctcatttctgctgcagtttttggctttgaatgtactggggatgaaccttttggatcctgaatttgagaagcatgagggtgaactacctcagccatcagagaccccaccctccctcaccctagtcattttgtaatggcaccactttgggctcaggagaggtatggaaatattgttgatgaatagggattattgggtcaaagattcacagtatccatgtaagacaaactctcctctgtaaaccagctaagaaggcagaacatggtggcagcaatactaagcatgatttgggagtgagattgaaggcatgtcccactcctcttgttcttttattttccaggttgaagaggtgagggcgggtgagatggccaagacaagaagatgccaaaatgtcaaaggtgccagtgaggaaggcatcagagctcttgctttgtttctcattaacctcactgtccatatggagggcaaccacattgatggagacattgaaattcaaaccaatagaagtcccttgcaagcccctggagaaatctgtgagtcttttactgctttgatggcaatgcaactgctcagtaaattgttttggagttgaatgtgcttctcataatcgtcaccttgactcttctaagtctgcataacaaaaccaagagctctggtgagaactaacttgggttggacatagtcaccatttgaaaatataaaatcttggtaatccatttttggcaagtcttgctaacagtggaaggtctagaaaaggtaacacacataaatgatagatcctgggttaaaaaatcccttgagaacaaacctctatcaggtgagggtaatgtctaagacatccacaacctagttcagagctgccagggttcctcctgaacaacaagggcagagtgaacgtttcctggggattttaatcctagtagacaccccagcttagccaacactctcagtcctttccataaagcccctggttggtgttcaccacagtgaacattcttgctggacagcttctctttaggaggccaagtagtttagcaccaaccagttgaatggctgctgaagaggagtcagttgtatttgtttccaacctgtttgtgacaattgtacgtgtcatgggtagtactgtaagttaattaattacgtaaaccaatgaaattcaagtgcaagagaaagctgtttctatgacagttaatgggactactttggaaagccttccttagaggtaagttagaaaagaaattaaaaagagaaagaaatgaaggagggaagaacaaaaggaatgaaggagggaaggaaggaagaaaggaaagagggaagaaaaaagaaaggaaggaaggaaggagggaaggaagaagggaagacaaaaggaaagaaggataaaaaagaaaagaaagaagaaaagaaggaaagaagaaaggaaagaaagaagaaggccgatctatgtttggtcaggaccactgagaagaatgggacatgtggatttgtcccaatttgcaaacagatcgttggtaaatggtcacatgctcttacttgagacaccagttgaaaaatgcagatgctacacattaaatgcagttcatggagtaaaagatggcacagagctccaatcttttcacccaaaacttcaagaagtgatcctaagtcatgtgattagagaatgattagggaataaatacatatttatatgttttaagttaaaatgcaacatttcaggtacttcctggccactgcaaagtttggtgattccttgttttaagtgatgatttccgtgagcatgcctgtgtcacagccgatcaagggacttttactgcaccatctaaactcgcagttggctcctcctgcatggatttatgatctatcttacacagtctttccttgtatggttactagaactttgtacaataaaataacaacatagataagttgaagaacacggcattttggaaggttttctggatgactgagctaatcttttcagagctagaacttaacattttagttctggtttggacaacatcataaagcttaaaggtgtgggccctggagcctcactgctggtttcatgcggctctagcacttagttccacgtcctggacaagctgattaacttctctaataatctttagttccctcatttataaatctacaataataactgtgctggcttatgtttttactgttagaattataagagataattcatgtaaatcatttatttattgttctctgtacagtaagcaccaaataagttctagctatcatctctaataaccatccttatgtccttggattatatgtcactaaatgatactagcctttactttgtgactcagtggtgaatgacaaacaccagacactgagagttgcagaagacagagatggcataggatggagtaaaaaacggtatatgtctgtctgggacatattttcttgaaacattcttagtgaccacattccattttggtaatctgagtttttcttatgaaggtcaaaacaaacttgggaagttttcatgaattcctgggcatcatagagaggagttctgcatttaagtttaattgattgcagtaaagaatgtggccttcagagaatcctctcttctacattcctccaatgcacctggacatcccttctgagctgcagatgcttctgtgtctcatgtgtccaattggctgagatgtttcacacgggcaccttagaccgacatagtcacaacagcactcaccatcttctatccaaacctgtgcttctcttgccccatctcaggaaatggccccatcatcttctcagttgcaagaaccaggacctggaattctcttcctgctgtcacttgatgggccctttggaggtccacatggacaggacaggtcagcagttgggctctccccctgatctgatggtgctccccaacactgagctctgtttcagttccctgaacgtggtttgcttctcccaccccgggcccttgggatgccatgatccagggccttgggatgcctctgtctggagtttttcccaccctctgccttcttcctggcaactcttactcatctctcaggttctagcacacgtcatttcctccaggaagtcttccctgatcaccagcttaggtcaggtcagggctcccatgtctctgttgagactcttcttcatcattgcacttgacacagtccactcaggggtgatctatcaacgtctgtctcccccactagcttgcaaaccccaccatgcccatcctgtttctctgcatctttagttcctgggccagtatctggaacatactagatcctcaatacagattttccaagagtggaaaaatgatttcattcgtgtctgtgtggtaggcaggattctacaatgggtccccaagatccttaccttctagtgtatgtgcctgggtgattccttccccttgaatgggtgtggcatctgttactatgatggacagattcctcccatgggcaggttgtgccatgtggcaaaggtgaagggcttgttcaggtatcattgaggttctaatcacttgactttcagttaatgaaaaggaaagtttcctgggtgggctgggtttaatcagatgcgccccttagaagaggagatggaggtcagagacaaaagaggtcagagggattggaagccatgtgagactttcctattggtcctgaagaaggaagctaccatgctgtagggggtgtgacagggagtaacaggcagcctctggaagctggtgactccagcctcataaccaaacaaaaaaaaaaaaaaaaaaagatcccatatcctgtgagcctgggagaccttgacctcagatgagggcacaggcccagctcacaccgtgattcatctgtcggaccctcagcaggggactcagctcaaccagacctggatgcctgacccttagaaacgatgagataagacatttgtattgttttaacgtgttaaggttgtagcaatctgttccacagcatagaaaataaatacaagtgggtaagccctcctgtaacataccttaatgtaaaaataccacaatcatttttctgaaacagtattgccttgttttgaagtatgaatatcggacaaaagtctgactaaacacccacacagacaccgcagtcagcttcattttttttcaccatcatttttctggtcttagtaaacagccacaggcaggtgtgtgtgtgacttgtgcatgcacaaacatgcatgtacatatgtggtacaccatggtagccagatccttctgaacccacaacttttcagtggcttttcctgagccatgccgtgccgtgcagatgctacgatcctggagggacatgtcacattcacagctgtcatcccaccaagcatgcacatatgtcccttttctcttcccatgtccataagactctagtatttttggcctttcctctcactagagcaagagtgttcattctttaaatgtttgactgatcctttaaccaaatcatcatgtggaaacccagcacataacacaagtggaagtggggtggctcttgaagctggggtcagggagagaatggagtctcccactgggcctcttgcttaccactgggcactgctgaggcccacctagtttgaggtaagaacctagtttgggatccactgcagtggagggagtgtggaaagccacatggtagaatctcttctaggacatcttgtctgtcgtgttgctggtatacctgccactgcacatggcacactaccataggctatagagcactggaatcttgagcagtgtggattggcagtacttcccagtgtctactgaggggcagcaccactggtggctatgcaaacatagcatgcaatctaccccctttcaggtctactgaggtgtggtcacatagtcaccccagcacacgtcacaggcacacactatccacaccttcacaagtatgtatggctcaaagtatgggtggtcagaagattcagaggtatccagatgtcagcttatttttttgcttcctcttagctctactttcagatctcctcccaatgagattgctaattgatggtggggagggagtagagatcacatattacacctgctgctggccctctcacatgtaccttcagagttaggtgcattagtgatgtgttcagtaaatatttgaacttaactatctctattgatacatatgcaaagtttactcttgtgtaaagggatcaaggctgaaactagcttttgccttcagagtgaaaacagcaattggaagattaatagattgcattttgtttgtgttctctttccttacggcttgactcgtattatagtattggcaaataaaatggcatcaggatttcacaactgtttttagaagtcaggtttagttgctgttgtgctcaaaaacagaaaagccagatcaccaagtcgtccttcgtgtttctgcagcaataatggggtacaagttctcactgatagagcagtcctggaaagagaacgtgaactgtgagcagtagtcacagaccccaaaaaatatgtccatgcacctgagtctatatttatggataaaagatgatatccatggccctgagactctgactacaggcatgagaatatgtccatgtacctgagactctatttacggatgagagatgatatccatggccctgaggctccgaccacagacatgagaatatgtccatgcaccggagactatagttatggataagagactatgtccatggccctgagattatgaccacagacatgagaatgtgtccatggaactgtgaatatgactatgagcccaagaatctttagatagtggtagagaaactacctgtagagaacaagcacagacttgtcctctaaacaaatatttctattgcaaataatcccttgcaaaagtacaattttgcctttattagggttaagtttctctttttagtatgaccagtgacctaataacacagtttaagcctccaggctccctagattaggaagactggtacaggacgtgtgtctggcatagacaactgaatcggatgctcgctgttaatgtagctatctttcttcgcttgcaagaacgttgataaacgctgaaacttcaacctgagcctaaaatagtatcttattgagaaagaactgagcaaatgttggtaattattattttactggaaatctatctgtatttttacacaatttaattgaaattgtaagtgtaatccaaacttcaaaattacaaagctttctcattgaagtataaatacgatctgtaatcaatttgactgggcatttgttctctgaattgtcctttgtcccttcttccaatcagataaataaaatagcatttaattctgtaaactgctgaaatgcctaattatattaggtattgagtctacaaaagtggttgacacaattcttcaccgtttctaaattattgaatttttcatgtgaacctgggagatgaagtgatattattctagttcttctcttcttccacccaatcttcactccacctcttttttctttttgagacagagtctcgatccgtcacccaggctggagtgcagttgcacgatctcagctcactgcagcctctgccacctgggttcaagtgattctcctgcctcagcctcccgagtagctgggattagaggtgcccaccaccacacctggctaattttgcatttttagtagagacagggtttcaccatgttggccaggctggtctcgaactcctggcctcaagcgatccaccactccacttctttttgaaaatgcagacttatcctaaagaaatattgacactcagttctgcatagtccttgtcccataccaccagcaaaagtgggattcatggcatcttccttggggtaactggggtacccaaggcagggttttcgatagtcaatcccagctccatacactatcagcactggagacaaaagcaaagcataattgattgacaaattagaccttgggccttggggtcaagttttgagacagaactccatgattcttaaaactccaatattaattaaaaattgatctaaaattgtgagttaataaggatctgtgaagagccttcccttcttattggatttctgtacattcttccaaaaatgcagatgcaaaacattttgtggatgatcaatttgctctttaaataataattccagtgacatttgcattattgcctagcaatgtaaaaaggagtatttcacccctactctgaaggagtggagagcaaataatcaaatattgagggtcaggaagcatcccactctgtggcaagcaggtgttttcagacaccacttcagctctcatacactggttctgtgcagtctgatggctacagcagattgtccctgaggacaatccagttcagagacacttaggtaaggtgcccaaagacccacgggcagcaggtgacagagccagcatttgcacagctgtttgtctgttacatttttaaaaaattaacttatggctgccttcactcaggacttagctttctagatatctctattgatgtgtgacttcctaatggcattacatttgaaccttagattccctaaataatccaatttcttagagcagaactggctgacacctgcacattccctggaaggactacctgtgcattttagaaaaaaactaaagcaaatgaggattagtttgggtgtagacattacaatgtgagaagggctacagaggcagcaaaaacaccaggtgagagtggatgcctggggctgctcggaggagcaaggcctggcttgccaaggtgagagcagagagtgacgtggaagatggcaggctcagaataacagggagtcattgtcaggggcagaaaggctgaagagaagagcgtatcatggcccctgagcaggtgttctttgcttccatcagagcagatatgggatggaataacagcatttttgatactctagtagtgggggagatagcatagacatcaaacctgcccatacacaggaggtgaccagcaatggccaacagctttcccgcccctgtactgcttggggaacagagtcccggcaagaagacaaaagttgcagagacaatccagcacagcatttagatctgctaatgtctcatctcaatgtatacttctgtgctggaatattttgggaaggttctatgtgggcatcaatttgacatcagttgctccttcctttattaaggtggaggctacttttctcactaccacggtagtatttatcagaacttatctgttccttaaacaggcttggccaaggcccctcagagtttcccttaaaataatacagaacctttgttgtatggtttttgtacgtttgggtaatagtcacaacccaatccaaattgtaaggaacagcaagaattattgttgtagaacaaaatgagcagcaatttaaatttttactaaatcaccatgaattcttgcaagaattaaaaaaaattaacatgaagttctcaaattaaggacttattctaaagtgattcagctggcaaagaataatagaacttcagtctgtacataattttcaagaagtggaaggatggatttaatcagagtttacactaatagctgaatagctactaaaattattctaacaagatacaaaacatgtatgacaagtattacagctctaggataaaatgagtttctatttacaataatacttggccaaaaaaaacaaaaaacaaaaaaaaagaaaagaaagaagaaaaaatatagaggaagaagaagcaatggattagacacatcaagcaaaggcaagagaggaagttaatggtctgaattgcactgggatattttgggagggcagcaaaggtttgcactgagaatagcctgatgaactgcagggtaaaggcaagtgagctctctgtgacccagcccttccagcaactgctgggacccaccgcccacccgtctctcaccatcctctttggtccgggtgaagatctgctcactcctgaccccgtctcctgcgcgggtgaaggccagcacctggatgctgtagttggtgtacttttccagcccgtccagctccagtgaaggctgtgtggtggtgatgtttttaatctcacccagctctggaggacaagaacaagaaaacaaaatcccacttctgagcccatttctgctcgtttttccgcactgtccccactgactgtccctgtgccatgccatcacccgtccagccatcatctggacacgagaattctcaaagggactgtgcacagtcatcctgtgagctcatggtgtcacgtggccctttggaaaagaacattcacaccaaactgctccagaacacaaggcagaacgttggtctggaaaacgaagtaattcgctccaagttaagtgttatcaacccaaggccagcaccagggctgccactcacccttcagcaggtgctaatgagcaatgtcccctgcacccctagcagcacacttagggcgacacacacacgctgcacacttggcagccccactgccgactattcattaggaagcttctgcaagctgaggggttttattgttattttaaacaagctctactttaacatacatgtatttttaagtacctaacttcatcccaaatatctgatctaccctcttcagcaagtttcaagtctataagacagtgtctttaactatagtcaccactttgtacattagatctccagaacttattcatcttgcataactgaaactttgtatcatttgggggtggaggaagaaaatggcaactatgtgagatggtggacccgctgttaatttgcttgattgtggcgagcatttcacattggatacatacatcaaaacaagctgcatgtctgaaatatatgcaatttttatttgtcaactataccttaataaagctgaaaagataacatatttaaataagaaaaaaatacacctgagctaaactgagtggctcagccaacccctctttttacctggagtgaactcctctcagcttcaatcctgaagtgacatgcccatgtgtcagaaacttggtgtcagctaaaaatgcttcactttcaggagtgggatcaactaataacattcacagatggaacactatgcgctctcaactccagcatatgatacacggcaatttgagaaaacttacgaatgttgtgctaagtacttccttggtgtttggctgatgggttttgaaatgagtcgccttcagagcatgagaagggcctgagaactgttcccctaggggaaggggctgtcagcgacacattggtacccagagcaggccggttaccccaagagaccagcaggtctggggagttccttgttgaacagctctgatttggcagacctgctcgtcaactgacaatccagctgcttgtcaatccctctcactctccctggcctccatatagggagtggatgtgatatgcatgcctgcctaggtgccagcgctatgctattctaagtacagatagtaacttatacaaccagcagagttattcaattacttttgcaacccattcattttacagacaaggaagtcgagggacagagaggatcaaggagcccagcacagtggctgagggcacaggccgcggatctcagctgctctcctcagtcgctctgggaaaaagcagaaaatgggctgaaaatggaggcacccacgagccgtcgtgtcggccagattaaacgggcttttgctttttgcctgtcttggttttccttcctgctcattgtttttcttttctcttgtgtgtccaggatattgcacagaagttcacaaatgaatagccacgtattttgtgtgtccaggatattgcatggaggttcacaaatgaatagccatgtattttgtgattacgatgactgtggaacatcttttgttcatcttttttttgtcaccaaaaagatcaatgtggaacggatacagcattaaaggagcatggcaaatactgcatgggatggctgaggcctgtccctcacatgccagagagcccctgtgccttctaggagttgcaagaagaggggtaaaggggctccatgtggctcccacagtccaggccccagtgggagccaaaggcctgggagcaccagaagcagacagttctgtaggctggggctttgctggggagggagcagggcgaggatggcccaaagacaggcctttggactcctgtcttctagggaggccagcagggtgccagctgttaaaggtcacaatttggaaatctcaacggagggcttacgaaaatgaggagactgtgtgagcatgtgtggtcaccaggtagtcaaaatatcaatacttggttgtcccagatggattggaaattctcatctctgaaggacgggtctttccatattcaattatattccttttcctgaatatatttaacataagtcttttggattaggataaaaacccaaatgtaaccagacatgatggctcatgcctgtggtcccagcctcccaagtagctcaaggtgagaggatcggtggagcccaggaactggaggctgcagtgagctgtgattgtgccactgcactccagcctgaaggatagagccagaccctgtctttaaacaaactaattaaaaactcatatgctaatggacaaactttaaatatagaactcattaagatcttttcagatttagaaacttcactgtcaaagatcacacacgtacctccctacagatatatacacacgcaatcaataaaaatacagctgaggggaggggctgatcagggcagggtgctggtagctggttatgagactctgatgaaggtctttttttcccaagagtgcagggtgtccacctcacagaaaaagtaggatcatttcacaatataggagaaagctgtgaccctccggcaaatacttgaatcagaatgcaactcttgaatcagacagaatgaggaagaggagcctggtggggagggagaaggacaacctggcctctctgatcttcttaaagaaagcaaacacttggcccggtgcagtggctcatgcctgtaatcccagcacttcgggaggccaaggcgggtggatcacgaggtcaagacatcgagaccatcctggctaacacggtgaaaccccatctctactaaaaatacaaaaaattagcctggcgtggtggtgggcacctgtagtcccaggtactcggggaggctgaggcaagagaacggcgtgaacctgggaggtggagcttgcagtgagtcgagatcgcaccactgcactccagcctgggcgacagagcgagactctgtctcaaggaaaaaaaaaaaaaaaaaaaagcaaacacttaaaacaaaatgattaaaaatgctaatggttaatatactaattagaattaacattggggggggggttcaagttattttgattaactaatttatcatgaaccatgaagacaaaggcagtcaaaatcccaattttaagatttctaaaactacctgagccacagttggctctatctgctagaacgcctcataggctgtgaaggaaggctattttcctgatgacagatactaggtgactagcagatatggaagaaataaaaagcaaagaatgaaaaagaagaaagccagatacaaaactgagtgtttagtttgccattctttttaacgctttttctttttaaacatgagtttctacagtctagctttcatgcctctgtagggctgtttaatacacacacacacacacacacacacacacacacacacacacacacacacacattaactgaagtgtattgttcagttgaggtcatgagtgaaataaaattaaaaaaatatataaaataaatttagaaatcagattttttctattaaaaattttgttttaaacaaaatagttttgtgtatttatatcttgcctcatcctcagagggttttaaggcagaaaacaataggtgcgggaatagcttctgaagcaagcctcagctgcccacacactccagttggcacctaattgttgcttcctttcagaatgtaccattttttccatgaagaaagatggatgagatggaagttagcaaaaattcagaggaaaatggtaacttttcaaaggatacaactttcctagcaatctcaaataaattgtttctttcaggccttaaccatgatttaactttctgaccatgaaaaaaaaatcagaaaattcatcaaaatattgtttatttaaccttccctatcaaatatactaaccagttttatttcatctgaccacattaacaacagaattctttcttagacgtattttggaaagtattcgggctattgctaattacagtggtagtaacaatatttgcccctctcagcctgtgtgaatgtgtggggggtgtgtgtggtgtttgtggtatgcgatgtgcatggtgtgtgtgtacctgtgtgcgtggtgtgtgtgtatggtgtatgtgtgtgctgtgtgtatgaggtatatgttgtgagtagcatggggtgtgttacatgtgttgtgtgatgtgtggtgtggtgagtggtgtatgtggggggtgcgtgtggggtgtgcgtggtgtggtgtgtgtgtatgtgtggtgtagtgtgtggtgtattgggggtgtgtgtggtgtgtgtgtgtgcatatgtatgcggagtgtgtgtggtgtatgtggggtttgtgtatgtgtggtgtgtgacatatacggggtgtgtgtggtgtggtatgtggtgtaggtgaggtgtgtgtggtgagtgtgtggtgtatgtggggtacgtgtgtgtggggggtgtgtgtggtgtgatatgtggtgtatgtgtggtgtggtgtgtggtgtatgtgtggtgtgtgtggtgtgtatgtatgtggtgtgcagtatatgtgggctgtatgtgtggcatagtgtgcagtgtatggggggtatgtgtatgtgtggtatgtgtggtgtgtgtacgtgtggtgtggtgtgtggtgtatgtggggtgtatgtgtggtgtgtgtgcatgtatatgtggggtgtgtgtggtgtgtaagtgtggtgtgtgtggtgtgtatgtgtggtgtggtacatggtgtatatggggtgtgtgtggtgtggtgtgtggtgtatgtgagatgtgcctggggttatggtgtgtggtgtatgtgtggtgtgtgtgtagtgtgtgtgtagtgtgtgttgtgtgtgtgtgtatgtatgtgtggtgtgtgtatgcatgagtatgtgggatgtgtggtgtggtgtgtggtgtgtgtatgtgtggtgtgtacatgtggtgtggtacatggtgtatgtggggtgtgtgtggtgtggtatgtggaccctgaaaacctgagacaggtctcagttaatttagaaagtttattttgcgaaggttgaggacgtacccacaacacagcttcaggaggtcctgacaacacgtgcccagggtggtcggggcacagtttggttttatacattttagggagacgtgagacatcaatcaatataggtaagaagtatattggttcggtctggaaggcaggacaacctgaagcaaaggcaagaagacaggaagcggggaggggacttacaggtcacaggtaggtgagaggggaagggttgcgttcttctgagtttctgatcagcctttccaaaggaggccatcaaatatgcatctatctcagtgagcagaggggtgactttgaatagaatgggaggcaggttggccctgagcagtttccagcttgacttttccttagtgattttgggggccaaaaagatattttcctttcataggtgtatgtggtgtttgtgtacgtgtggtgtggtatgtggtgtatatggagtgtgtgtcatgtggtgggtgatgtacatgcagtttgtgtatgtgtatgaggggtgtgtgtcatgtggcgtgtggtatatgagggatgtgtgtgtggtgtgatatgtggtgtatgtgtggtgtgtgtgtgtggtatgcgtggtgtggtatgtgtggtgtatgtggggtgtgtgtatgtgtgttgtgtgtgcatgtggggtgtgtgaggtgtggtgtgtgtggtgagtgtgggatatgtgtgggtgtggtgtggtatgtgatgtttgtgaggtgtgtgtgtggtatgtgtggtgtgtggtgtatgtggggtgcatgtatgtgtggtgtgtgcgcacgtgtatgtggtgtcggtcagcagtcacttcctgctcagtgtctgtgggaatccagccagtcccggaggctgcagtctggggagtttgtgcaaaagtgtccagtagccccgtgaactgacctgcctcataaacgaaatctctcaggtagcaggaagagtgaccattcgcaggcaggttcatgtttctgaaggtttcttgcttatctttcggaaatgaagtgcagacttctacatcgcacatttatctcatcactttgattttaatcccatgagtgaaagtatctttaaaaagctgcatgcacactcccaagcatttctttgtttaaagaattatgtttttgaatattcaagttttcaaagctttaaaggtatgaagccacatctttcattttagaatgaagataccagcaggcaatgctagcaaatgtgagtgagcttagaaaatatgggtgatgtggatgaagtcaccactggattctgaaatatttccaataagaacagaaaagacatcttagcataacactgcctttcaaagaacattaagggtatttaatttcatccactcaatataaggagtagaaatcagaagaaacatatgtaatgatatcctatggtattttgtccataaaaatagatgacttttgcaaattttcattgctctttactctggggtgttttaaaacttgtgtttaggtgggaggggtgaaggtgttacagaatcatctacttaaatctgcccttctgtggggctgtcccttcttgggtctgtggttctgtattcattagcatctccctcggtcactggtctggaacctccacagggacagacacagcaaccttggtgtttcccatgagctcagtgtcgagtgggtgtttggcaaatgtgtctactgcaggaccaaggagggcgggggggggtccttctagattgcctcccatggctggtagtgctccaggtactacatgtggcaacaaaggcatgaggtctgctctcagtcctgagaaacacatgttagggacacagttagggacatgcagagctaaggctcaaaggcctatgctcgctgagccagtaatgcttgtgctgctcatgtgtcttcttgcctttactgttgcaccaaccgtggaggctgctgccacctgtggagccctatgtttacctgcatggggacaggggtctgcctggtagaacagatccaggtggtcctgagcagggaagggataggtccttgaccgcatttgcccaaaattagaggtgagcactcatcagggatcacacccagtcagaggggttgaaagaagccccaggctgggcgtggtgggtcacgcctgtaatcccagcactttgggaggccaaggtgggcagatcacttgaggccaggagttcaagaccagcctggccaagctggcgaaaccccatctctactaaaaatactgaaaattagccaggtgtggtggtgcacgcctgcaatcctagctacttgggaggctgaggcaggagaattgcttgggcccggggaggtggagagttgcagtgagctgagatcgtgccactgcactccagcctgggtgacagagggagaccctgtctcaaaaaaagaaaagaaaccccaaacaagagggaaggtactgtccagtgacggggggtgcaggagggggctggaaatggagggcaggggaggaggcaggtgtgggccccccaggcttgggacagagacagtgagcaggcttccagaggcctttcctgctgggggctgcagcctcgctctgccccagcacactcacgcagcccggcccagcctggtgggcaccactcgcagcctgagggcgaagacactgaggtgttgctgcaagaaacttgtggccccaatcttatgtccacttgagaaagtcgtttattcaaagccttgccctaaacaaacaggaacattttgccctaccacttgaaatacacacacacacacacacacacacgataaagaacaaggaaaagagagaggaggagaaggggaaggaagaggagaaagagaaacaggagacaaaacgggagggccctgaacttcctggccccctcctgagtgcccccctccatgtgcctgggcactcttcccacacccacttacagcacaactacaggaaatttaacgtttccccgcggagttctatttgggaagtaggaagaggccaacattttagaatacatatcacacagaatgttctagatagagatggaggttttggtgctgcctgcagagccttgacatagacataattaggaaaatacatccatgttgaaatttcccaagtgccgcccccgcctaggcttcaacttgggtttcgaaggtgtgtgatgttttaaacaaagagacctgttcaaatgtcagatgagggatgacagaaaaggggaaagtgtctattgataaagaggtgcccgccatatcctgagccccttgttaggaactaggaggggtctgcaaattccatcatgcattctctggaggcaaacccaaagtcctagtttagtcctcttacctccgtccatgaggttggcccagtaaatgactctgaacccctggagaattccattcaaggcttccttggaaagtgtggaccaggatattgatatgctttctggtgatgttgctatggcttggacattttcgggggggtaactgggcactgaaatcaaataattagaatctgtaataactgtgggtggtttatgagcaaagcaataaccgaaaaagcaacgtattttaatatttcaatatgcaagcaaaaaattgcactcaaccccaaaatgaaagaaaaaataacaaagatcacttccctggaaaaatcttatgataactcagtgctcagtaaaatatcatgagtcaatgcatatattctaatggattccatagtctctctttccaacttagtttctttacttttaggacagttgttgggacttgagtcgtgtacccttcttaattttattgcctgagtagaaaatcattgtttgtctgatttattttccccttactcttggaagttacttctttaagttgcatttactttatagagtacggtacctctgtatttagtaatatctggcatataaattggaagctgaaccattgtaaagtgctaaaaagtagaaacataatcatagatttctcctgtctcatcctcatccctttctctagagggaagagagaccatagacaggtcagaagaatattgaaaatatttttagtactgagcttttgtaaaccttaaatgttggcgctggggcggtgcaaaatactggctgagacacgcatcttaatgaaaaatgagcattgaagcaaaaacaaaggcatatttaacgactattgcaattatgaagatagacaattccagtgttcaggctgcaagtcattgaagactcctctcctcgcaaaaattgtcagatattacaggtgcaagtcctatctgcctccgcaaacctgtgatcaagggccgggcgcggtggctcacgcctctaatcccagcacttttggaggccgaggcgggcagatcacgaggtcaggagatcgagaccatcctggctaacacggtgaaaacccgtctctactaataatacaaaaaattagccaggcgtggtggcgggtgcctgcagtcccagctactcgggaggctgaggcaggagaatggcgtgaacccgggaggcggagcttgcagcgagccaagatcgcgccactgcactccagcctgggagagagagccggactccgtctcaaaaaaaaatctatgatcaaatgactaactgcacaagaggtaaatgtagtgccagcttcctgccttcaaagctaccacttattgctacaaataaccccatatcttaacttcctgcctaaaacactgtgcctctggataccagggttctctattttcaagcactactggaaatttgagcttctgggttattctcagtgacatggtggaagggctaattaatttatctcggccgctagggggcgatcgatcactgtgcaatctgaaaattccttttctctgtactcagaatgcttgaaaataggaaacaatgaaaaataaaataaattttaaaaaaccttcttaacatttgggagaaagttttttagcaaatagcatttctgcattctcgtgagacttctgcagtaatagagagagccttgttttcactccagaaaagcccaattcttgtacctgaaatgaatgaggaagagtctgaaaagggagggacttgctggctttgcagtccagccctgccccagggcgggcagatcagcggggtgggcgaggtcacgagggaaggcttttccacccgagaccccaggccctgcaggtcactgcaaagtcgtggggcgggggagtgcgaggttgggggagccccggggcagacccgagggaacctttgcggagggaaaagccacgaccaggccccggccgaacctaccatcctcgagagtggtggtgatgatttcctgagaagaaggccccgtgccggcccggttacaggcctgcaccaccaggccgtactgagtgaacttattcaggttgtccagggtgtaaacctcactgtccccgctggtgtcgacactgataatgttgaattggaagttacccccagtgctgtactctcggtaacctatttggtagccacggataatcccattttgcaaatgtttcttgggagcctaaacaggagagaaaagaacacactaaagaagtcttgaggtaggacaagagcgaaatcaacgcccacacccacgtaggaaagcagaaataaagtggagtcatcgccacgatgctggggcggtggtccggtagcagccgcaaacccacgtacagtgcaacttggtctgtgccaggcacccttcctttacctgtgaatgcatccggccctcccagcccctctgagccactggaccgtcaatggacacaggaggtcacctgagtatgcatggcaggagcggaatctgaacatgggtgttgggccccagagcctgcgctctcattctgtccttcatgatgtactggttgacttgtctaactggcgagaaagtgtcaaaatacagatcatgtttgtggcgtctccaggtacgcttacgaccgggtgagactgaccctcaggcctgcacccagcaagaactctcgggctcgctgctgtgtgccaggccttgttccaggcaccagggaatagaattgagtttggaaatgtaagaagacaaaagaaaagacccccgtcctcatggagcttacattctaaggaaatatcccagaatcacagtgtttccaggttgaaaactggcatgggaaggtgagtgcacacccaataggaaggtaatctctttcatgaagccccgaatcattctggaatgatttgggggtgattaaatgtggggcaagagagaggctggtgctaactccaccctgctgatgtgaagatggtccaccaggtcaaagtaggatttaggctgatgcgtaggactcatttagaaaccagagccttttcaaggatggtataaggctgggcgcggtggctcacacctgtaatcccaccactttgggaggctgaggtgggcggatcacttgaggtcaggagttcaagaacagcctggccaacatggtgaaaccccgtctctgctaaaaatacaaaaattagccaggcatggtggtgggtgtctgtagtcccagctacctgggaggctaaaatgggagaatcacttgaacccgggaggcggaggttgcagtgagctgagattgccccactgcactccagcctgggtgacagaacaagactcagtctcaaaaagtaaaaaaagatatgcgaatgccaccaagatgaggctctagggaataaaggttttgtagactttcaggcagtcaacagatatgtgtgtttatgtgtatgcgtgtatgtatacatacacacatacatgtgtatgtatgtatacatgtacatatgtatgtatatacatatacacgtacacacatacatttaagtacaaactatggatctggatctctcaagcctctgaaagctttctccgtcctgaaagtgtttataatcgacctgcagagaggaaataagcacttaagaacctgtagagaactatgaagtgtggaaatgcatggtaagaaagtgaaggccagcaggcatctagaaagtgtgagtatgggtggtctgaagtggtgggaagactcagagcccaggtgggcttgacggagggggggaggtggcggggcacggctcagagaagtagaaggaggatggggtgagtggagcctgcaaagggtgcacacctgcccagcggtaagtcaggagggaacggacagagtggagcaagaccttgaaaacctgccaaatgtgaccgggggagggcagacaatgagaagtcagaagaaggtttcgagctgatgaacagcattgatggattcagcaaacacttatggattgcctaataataacttcccaggggattccatgcctcagcctgtcattagtagtaagtctgacttatccaagagcagtaaaatcatttttgtttttcacagcaagtttctccatttatggttttcttggactccacttgcttttcccaacagccaatctaatttagtatattcatggtgccagcaggtgtcagtgaaacagtcgcgtaaaccatttatttatttgtatctgttggctcggagttagaccctggtggaagagctcataccttttttattataaacaaatgtctatgctcctctgaatccacagatgtgctggcttttgcattgatgagctatggcttttctcactgtttagaaatagatttcaagattctatgttttgaaaattcaattactctatgtgaaaattgttttgctgcaaccactgaattacatttatgtgacctaattaattaatcaaatgaatttccctgtaaacgtcacctataagtcaaatttaccaacaaagagatttcccctattttacctagtgttttaatgttagatatagtgacccaaataaaataatattattttttaaatgagatttacatccattaaatattctaattgttcaactggctcccggtgaggctttaagcctccctaagacagcaagttggattcacagtatgggggctgtggagtcaggtcaagaagagtagacagtaaagtcaaatgcctgtgagaaagtgttttcatagagccaccaatttagctaaatcctccacaagaatgaagggacctgcttgctgacatgtagttcctccagtttggggggattaatcctgcctgtgatctgtttgtacaggtagaaaggagaaatcttcccttgtttcctctccatgggtgaaaacccatcctaactagcttaactataatagacaacgcaggtgtttttgttctgttccatttcaatattttgttaaaaagaaaaagaaaattctttacatttttcttagaagaactacatttcagtcctgtggttctaaaataaagcttattttttcttagttgatacttctgcaaaatattgtgtggaataattatctcattttgttttataataaaagtaaacaaccaccatttctatccaatgcaattctattcacattttgatgcatttcagtctatttatctaaagtaaagtgttttgccccacatagctgtgtttgtagcctgtacaatttagtgtctgagtttttcttcttcatttaatatgctattatgattatattcccatctttacttcatagtctttaaatatcatattccatcatattgatgttttattttatttaacctttttttaattgttggggatattattgtttccaggtttatttactaccacaaatgctatgttagacaccttcacaatatagtttctctgtttctaagtttatttattgaactcaagtcccagaagtagatgaccatcttattttttaagtccatgtttcaattggctgttaatgagatagggcttttttgattattattcttccagatgtgcaatatcatagggtaagttaagggattatatcacaaggaacaaacaagagagctctcctctatttttcttaatattccaattttgaaatgaaatatatggagtagagttatgcgttatttgatggtagtagtgtttttacatctttttttttcagggtgctaatatgatctatagttttcatgcagaataaattgttgcacctgaggaagaagtgagatgtgtttcttataaagggaacatatactttcagtttcatagcttgcaggtccccaaactataaggtttaaaaacagacttaaaaggtagtgggagaggatgggagcagcagccagtggttgcaagctttctctgtggggtgatgcaaatgtttacaattatggctacggctgcacatctctgtaaacatatgaaataccactgaatcatacacttaaaatagggaatgctatggcatgctaactgtatctcaataaagctgttttttacaaaggtagtgtgctaactcatctctaggttatctttctatttcaattacaacactaactggcacctccaccatgatgaccaccaccaccaatcaatgcttaccacctctgcaggtcactgtcaccactgccaacatcaatgccactccctcaggtcccccacacagccaagccaccaccatcactactaccatctttaccaccatcatcaccaccagcttcatctctgtcaaaaatactgtgaacaccaccaccaccagcaatagcatctctaccactgacatcaccaacattacaaccaccagtatcaacatcactgccataaaattaacctaatggtagaagcacctctatcacttcttccaactttaccaccatatttatcacaaacttcaccaacaaaccacactttaacctccactacttccatcatcatccttgatgttaccaccatcactgtcactaaaaagatgcttcactttatcactatcccaaaaccaacaacactatcaccaccaccatccatcactcaatcactatcccaacaccaacacaactatcaccacaaccatccatcactccattactattccaatattaacatcactaccaccgcaaatatccatcactccatcactattccaacaccaacattgccatcaccacaaccatccatcattccatcactatcccaacaccaatatcactatcaccacaaccatccatcactccatcactatcccaacaccaatatcactatcaccaccaccatccgtcacttcatcactatcccaataccaccatcactatcaccaccaccatccattacttcttcactatcccaacaccaacaccactgtcaccacaacatccatcactccatcactatcccaacaccaataccactgtcaccacaacatccaatactccatcactatcccaacaccaacagcactgtcaccacaacatccatcactccatcactatcccaacaccaacaccactgtcaccacaacatccatcactccatcactatcccaacaccaacaccactgtcaccaccaccatccatcgctccatcactatcccaacaccaccgtcactatcaccaccaccatccatcgctccatcactatcccaacaccaccatcactatcaccaccaccatccattacttcttcactatcccaacaccaacaccactgtcacaacatccatcgctccatcactatcccaacaccaacaccactgtcaccaccaccatccatcactccatcacaatcccaacaccaacaccactgtcaccacaacatccatcactccatcacaatcccagtgccaacatcactataacgacaaccatccattattccatcactatcccaacaccaatatcactatcaccacaaccatccatcattccattactatcccacaccaacatgaatgccaccacaatgaccacaactactactacctctaccacctccacttccacttattgaacactgttttttcccattgtaattggtgctttatgtatattatttcattttctttccctaaaaaaccccacacagtataagtatgcttctttacacatgaagaaacaaaaggtcaaatatgttaaaacaactatctcaaggcaagtacagggtaggaattctccaaagttgtatttggtattaaccgctcatagagcctcagagaacttttcacccttttgcaaagtttgttagttttgtaaagtaatagtatacatggcatttctaatcagaggaaaatttaatagatcacatgaagagaaaattgtatatttttatgcataaaagcaagcaaaaattctttatcagggaaagtttaagttactttattaatttgtagatagactagtcagattgaaatttagaaatgcatttaaattaaagaaatccttgtggatgtattttaaaacaacctctgaaaaaaatccataaatgtagggattttgtatattaagtgtaagaaatgttatggcctgtggttcaggttttcgaaaatgacactagaggctcactctgagttatggatgagtcagtaggagtggaaggtgtgcttagtggagacacgtgaatccatttgtctggcagtgggcttcatattcccaaggcaaattagtgcataagatccttaactggaaaattgttttgaatgatgctttagacatctttgcttggagcatgtgtctactaggaacaaagggagatggttttctggggtatagagaatatatccttatagggaaatgatctttagaacactgtattaaggttgttaattagcactgtagaacaattgatacatgggtggaaataatggttcactttcatgaaactcagtgaatgaggttaatggtggggtaagaagaaaaggaaaacaagaaatcaggtagggatctggaaacatattttgaatctgagttgcataatattggagaagacaaatttcctaggaaaccactttgaccatgcctctttgatctctgtctcccgatctcagtagtacctgttgtgagatctgatcgctgcctcatctctcaagactaatgcctcctgggtgttgcttgctcacctgcgttcctctctgactgcctgaaaaagggtggggatcccaactgtcttacatattcccaccttataaaagctgttgtcaaaaaatgttcttccttcttctttcaaagaatacccccactactccttctctgcaggccagctcagcttccagctcaccagggctcttccctagaccactcccaccaagaagccttctccctccctggtctccactggcattcactgatcacttctacctcctctagtggccaccattctcaatgaaacgtggtttcaaagaatgtcattgcaagctctagaatgcaaagaaccctacagaatgaaatctcacttgttatttccccctgtctaaatcggggcttcaacactgtggatgttctcagaagatattcttgcagatggagaagagaatggttttgaacacacatgagatgcaaaaaaaagaggtgggtaagaatgatcacaggtacaggtttataatctaactgggtaaaggactgatagcaagggtatgaagtcagaagaaattccttgactgcagacacatggtttagctgttgaagagaggcctggcttagccactacagaagtggagaactcagcagtctagtgtgacagccgggaagtgtggattcaagctgagagttggcttccgcactgggacttagcctgctggcctacacagaaggatgacaggttgaggcaggatttggaggggttgagcttcattgcccaggccccaccagggatgaaaatagcttctgatgagccaatttatttggacactgtcattcatttttttccttcttaaaagaaggattccagaaagagaatttgctcacttactcagccagccggtgggttacatgtttttatgatgatggacctgcagatttacagcaaatctcacctggtaaccagtcatcttaagacaaattaaaggagtcctttgaaacgtaagcatatggaaaaaaaaaaacacaaaaaaaacaaaaaactaagggctcccttctactcctatttaagaactcaataaaacaaggccctttccacagggaaaatgttgaaatttagaaatgtgtttaagttaaagaaatccttgaggacgtatttacaaacaaccgacttctttcctaagtgagtgctttctgtttgcctcttctcaaatccccttgaacgcagtgcaaatctaagagaaggtcatgcctgctccttgttaggtttctcacacaaagattgtttttcccatgttgaactttactcccccattcatttgcctttggattcagtaatgatcctgatttcttctcatttctttcatttatctgccatctgtggaatgctctctcccccttcctagcctggcaggtttttttctcctgtagtcctcctcaacagcctcctttcatcctcccagatgccctttctccagcttccaaatccctcccaacctccacttcctttaagaaaccttctcttttgatctccatgacaacagtcgcaccatgtcaatgtatttgcacggtgtgcaagtgacttattttatatgtccttctcaatcagtcggctgcaagccgcctgtggcagatgcatcatcctttaaagggacagtaaaacagtagacgtgcaaatgctcactgcacctgcctggatgtgaatgattagaacaggcatctcttgtgctgaagaccaccagccatgttctgtttccctcatgcctcctgcccccttcccattgaaaggaaatggcctctgctggatgtgcagaattcacctgttggctggagtctgctaagagcctcactgcagaatttcacgtttgaagaatgctgcctttctcaggcatgctgaataatttagttgggaaatgaattgaacattttctttatagattcctccaaatccacttaaaatgtaatctatcctcatttcccttatgtgacaagttgggtggacagtctttttcatctttgtgcgttttctgcagcctccccttacctgctttccaacataaacagtagccattccataagcttgctcagtgaatgggtgcatcacattgaacaaaccttaactgggcatctgttctacacaaggcatggcacaaccagggacacctttgagtgaatcagtgctcagaatactgcctgatacttgcagtgctgaaggtttgcccagagtactatggaggggcaaatcgtggtcagaaggattgccagagaagagcatacttcacctgagctaaagggtgactggacattgccttggagggtacaatgctgtcgccaaagcaattggcatacacagctgcacccaggtgcaaggacagaagacacccaggaatggagagaggctcaagtgactctggggtgaggtatccatggtgatcacaggggtgggggacggtacaagcacagatgaagctagggacatatctacgggacagaacctatggagcctgtatgtagtggtatggtgcgctaccagcaacatccacatcacctggaaaactgttagagctgcaagaactggggacccactcagagttcctgaatcaggaataaactctgggggtggagcctggtgaggtgtgttttaaaaagccctccaggggataccagtgctccctgagtctgagaatcactgttgttatcactgggagtcactcagtgatttagatttggctttgctgggagagactatttagttaaaaagcagcaactatgcattcccccatttctcaggttagccagtagcccattttcctggttcttggccaaacaaaagggaataaatgcacataaaactgttagaccttcctggtcttgggagtaatttaaagatctaccttactcagcactaaagggattctgctttacaataggtataggggtggtgtgagaaccagctggctatcttggtccatggacaatggattttgagggggctatgtcaggtcgaggagacctcttacattattgcctcaaataattcctttcctctcctctctcctttctttcctctcctttcttcttccttccttccttccttcctcccttcctttccttccttcctcccttcctttccttccttccctctttttcttttatttttctttctttttcacagggtctcactctgtcacccatgctggagtgcagtggtgggatcatggctcactgcagcctcaaccaccccaggctcaaataatccttccacttcagcctcctgagtacctgggatcacagacatgtcaccatacccggcaaatttttgaactttttttgtagagatgggtttttgccatgttgcccaggctggtctccaactcctgagcttaaataatctgcccaactcagcctcccaaagtgctgggattaccagcagtgaaccactgcttccggtctcaaatgatatttttgttcatatatctctccttagagttgcactgtattaaatacagtatctgtgtcctaggtctcataatgggtagatgtatggccacgtgactggctcccccaaagtcattatcttttgaggagctaggaaaggatgagatgtccacatttcatgaaatagaaaagggccacatgacctgataatgagacagtgcttagaacaaaggggctgtgcaatttcagtttgagaaataaatgataaatgacagattatttgaaataggcactgtcttgagagccaagaatgttacttgcaggctgcagctgccatattctagtcagacttggcagctgaggaggaaagagtggccaaggtatatgtgggctttgccttgagacacaaatgcagaatgctagaaatagattgataattttatgacatggaattgaggttaactactgcaaagcaaaactccatttattccatttctaaagtgtaggacagcttccgctttattcatccagccaacaaacacctgtgacatagctcctctttttgggacactccctttttgaattctgttgttcctcatacatcacaccacctgctaaccacagttaacatttcctaccagccacagaggcctatcagtgctctctgccaaggaccacacaagggcattcgggctttgcttcctatgaatcaactctgagggctggcctctgggaatacccccacctagctcccgcgcccaacaatggggacctagagggtgcactctgatgcaaaagagggggtatgctagtctgtgagcctgaggctgggccccaactatttagcggtggctgagtgaacccaaagggctttggcccaccacacacgcctggagggcccaacccagagtagcccctctgcaggtaatggaggccctgtaacggcagtgtggccaaggagggcagggcaggggcccgagaaaggccacagagataagggagggaggggcaccccgactccaatctgataaacaagcacaagaggcaggatttcaaaggcatggtcatggggccatgaaaaatgctcggaagtagttttgcgggatgggagaagacagtgtctgattctggaagctctgtaagacagcgccaggggagggccaatcatgatccaacaccgctggtaaagaggtcagtcgggcaggggtggagctgagtgagatgaaggcacatccacatccacctctcaccccaacaaaccactgggtctgcatgctctggaggcatcctggatgtcttgatgagaaaaggcaggaaaggagggtgaagaagaatcttccttggaacgaaacaggccctttccactggggagggcagggcgtgggaagctggaggccaaggcagggagccaagccaggagtcgccccagccagtgctctgacatgcacacagggcagcctctgtctaccctgtaggtccttaaactggaactgcctccatttccctcccaccctatatataatataatttatattatatttaataatataaattaaagaataactaagagaacccttaagtgatgtaggaggagagggtaagtatggagacaaactgagtcctggaatccacagggatgaggctgagagccagtagcgggtgagagtgaccctgggctggaagggacacacagatgggaacggcactgccaggaggcaggtggaagctgtgacagtcaaactaagacagagagagagagagagagagagagagagagagagagagagagagagagagagaaaggggcttgtaaaggagtaagcggcatcagtcacacgccgggttgttgcagcctttgtcatttttgctaagtatctgttcagaagaaccagagaagatccaggtctcagaaggagcctgcccactgaaaggtgagctttaattttataactggaaggaattcctgagtgctttacatctgtgccaaaagaaccaatgaaccagaagccatttttgagtggggcactgctataaagctacctgaaaatatggaagcaactttggaactgggtaatgagctgaggttggaagagtgttgagggctcagaagaagacaggaagatgagggaaagtctggaacttcccagagacttgttaaattgttatgatcacaatggtggtagtgatataggcaaagaagtccaggctgaggagttctaagacgagatgaggaacttattgggaactggagcaaaggtcacttctgttatgcattagcaaagaggttggagggattgtgcccctgccccaaagatctgtggatctttgaactggagagtgatgatttagcatatatcatatatggcgggaggggctagccttgtctcagatgagactctctcagttggatgtggctccctctcgagagatcatctcaatccaggaaataagggttgacaaactggtccctcctccagatctgtttggctgcttgtttttatgtggctcttagctaacaacggtttcttgttgtggcttacatttttaaatgattgaaaaaaatcaaaagaggaagaatattttgtcatgtgaaaattatgtgaacttcaaatttcacctttcctaggtgaagttttactggatcccagctgtcttcactcatccacgcatggactgcagctgtgcctatgcagcagaattgagcagttaagaccgagactgcagggcctacaaagctgaaaatatctgctctctggcccattagagaaacagtttgcagactcgtacaggacagtgctgtggacagaaccagcatgtgaggtagaacttactgggtgtgctgcaggtccaaggcagggtgggaaggagagaggggagaaaggttgacaggagaggcactactaagaaaggagcattggagaaaggcctgggctctgcccagtgttggttagagttcgttactctccttttatccatgctccaatggatagttctaacttgtgttctatcagaagacaaggaatagtaatgtctgcagtaacaatggagctccagtcctggattcaatatctgccctctatagctcagtagggattaagaggaggatggcattctttctctagagctaggctttgtctctctttccttttcttttttcttttttttttttttcctgagacagtctcgccttgtcacccaggctggagtgcattgatgccatctcagctgactgcagcctcgacctcccaggctcaagtgattctcccacttcagcctcctgagcagctgggaccacaggcacacaccaccacacccagctattttttttcttttgatagagatgaggtctcactatgttgcccaggctggtcttaaacccgtgggctcaagcaatcctcccaattcagcctttgaaagtgctaggattataggtgtgagccaccatgcctagcctcttatctatttttgggtaatgaaaagctttagccttgactaaagagaattttagacatcaacatgcatgaataggtatttgcgaggagaatattgaaaaagttgtctgggcaaggcacagtggctcatgcctgtaatcacagcacattaggaggccgaggcaggaggaccgctgcaggtcaggaatttgagaccagcctgggcaacatagtgagaccttgtctctacaaaaatcaaaaagttaactgggcatggtgatggtggtatgcacttgtagtcccagctactcaggaggctgaggtaggaggatcacatgagcctggaaggtcaaggctgcagtgagccaggatggtgccactacactgcattcagcctgggtggtagagtgagaccctgtctcaaaacaaaaacaaaaacaaaaaaacaaaagaaaagaaaaaaagaaaagaaacagttgtccaataggctactgtatgttccctgttaggaatgtgctagaagcattcagaccaagggcccctgtgaacactctggcttatgttgaggggaaatactccacaagtccagatgcaacacgtgccacagattccacacgggcccacgggagcaacacaggcactccctgaatcacactctccttcagtgggaagtcttgtttcctaaattcactaaggatctgccacctaaattcttctgttatttacagaaaaacaaaccctgtttccaacttcaaattgttactggcaggcaaaacaagaaggtaaaatggttttatttcttatacatctataattactcaaagcacaaagtacttttatttttggtctcaacttaaatttttcaaaagaacaggaagagtttattacaggaattgaaagaatttgaagtagctttcagcatttttaatacaatgaagagtttggctttaaaaatgttatgggctatcttgaaatagtttgttacatcttagtgcattaacttaaatgtatttgaactagtgaaatacgtttgaaggcacacattgtgtttttctgtcttgcttcatgctaccttgaaaatagtctggaaaatagctgtgccctcctggctggggttcttcctgtgatggaccctaaccaacttcgtccagccgagttgccataataataacaataaaactaatgtcatgtttcttcccttgccttaggagaggggtccatgacatagcagatgccatttgatgatgtctatgtaattcttgattggatatatgttttcctttttcattctaacatctgtgccctgtttactaacttatgtatctcacttgatttctctgaaaagatgggaaatgtcatcagcgagatggcttaaggactgctgtctgaggaaatacagcacattaaacagtgtatatccacctatgcactccctgtacggatggcatccatgcattcataatgctcaatgccatattaactttagcttgattttccaatttgttctctgtgaaaagcagagttaggattatatgagaactgataaaactgtctaagatggtcttctgaatacttttattaaattactacctacccatctatttttaaaaattaattaattaaatttttgagacgagtcttgctctgccactcaggctagagtacagttgagcaatcttggctcactgcagcctctgtctcctagcgttcaaggaattattctgcctcaacctcatgagtagctgcgactataggcatgatccatcatgcctggctaatttttgtatttttaatagagatagggtttcaccatgttggccaggctggtctcgaactcgtgatgttaagtgatctgcccgccttggcttcccaaaatgctgggattacaggcatgtgccactgtgcccgaccctatccatctattattaggttactgaaaataaacttctattttttgttgggaaaatttcaccacatttacatttattgggagatatttgccatcagaaatggcagtgctgtccagagccattggtggggtgggcggaatcagcatctaggatagggatccaaatcggggttgttaatcaagggaccaccttatggattccagagtgggcccacatccgttatcctctatggctatcaagtcagcactgggaggtgaggagagaggagaattcatcattaaaatgcactgctactttcttggttatgacataatgaataaaacacacaactcagaactagagaaaagggttcaagttccaataatgacaaatcaagtgacttaaggtcattttgttaggtgtagagatgggtgtcgtatctaattttctgaaatttaatccagtactttttacactgtattctaattatatataatttacttgttggaaatggatttaacttacgctaatgttactttaaaatgtgatgaaatagtgtcaacttatatttttacatgtacttttcagttttcactatgaatattacatgtttgtatatatatgttactgtaaagcttcctagtgaatattatgcatagtgtgcttattagacaatttaagtcattttcaatatcattctgaccatacacaatttttgacctagtgtcacaacttcaggacctggtccaattgtaaaaatgtaatgttgatgcactaagaaaacacctaaggatgagcgtcaatagatgtccaaaatacccctttagttgcaaccttatttgcatttctgataatatgctctttaaatcaggcaaatacaatacttgccttctaaagttatattgcaactttacagcttataacctaaccgttatacaaaaaatcaaagtgcctacacttagattttttgtgttcatccagactcaacgtgaaactcttagaagaaaccatccaacaggatttctggctcgacggcagacggccttggtcctaagccttagtccaagttcaatttgtgtcctgtcaaggccactctgctggagaggtacagctttttcagtggggtttgaatcaagaattgcctcttaggctgacagtcccagatagtgtctcttcccagcctgcctgagcatcagacctagattccacccctgtggctgcgagtagctcttgcaaatgcagccagcattttcctggctgcgctctaggctggaaaccaagggaactgcctgcttagttgaggagacctgccggaccctttgtgcatgcaggctggcagctctgtcctgggacagagaactggagtccttgaagaaggcccatcacatggctaaaccgagaggagtaacccaatgtatagacggagagatgcagaatacattccaaatggtataaataaacaccatggcttcattaaagaaacatgcatagtttacatatacaccaaaaagatgcaaatttagtcacctagggctttctagaaagtccacagttttttttttaaaagcaccacctcttgatatgaaccttttatgataaaagtaaacaatggtaaatggtttatgcattaatttaacgcatattaattgcactcctgctgagggtacagtgaacacacaagacatgtcctcaaccctcacggaacctagagtctagtccacctaaaaaagttgagaaagaacaatcttactttatacggatgaccagagattttgaaatttttttttcttttcttgttatcaaggaaggaggttagactcgttaatatgagaagggctaaaaattctttaagtatttgtaagacatgttggtgttcaggaatttcaataaggctattataaaaccaatgctagaaccaatggattagttcctaaaagcaaatgcaaacttttgtcatttttcatagcctaaagattaaagtgatagttgaagaattaagtaaagtttatttcaaggcaacctttttgaatttcagttgatataggaaaaaagggtgtctactcactatgaaagttactctaagcttaagtttacaatttggaaagaaaaggatactacgtaagaatgtaaatttcatatatctttaatttttatggggttgggtataatttataacatgagtttgcaaggaatagtaaagggagttaatatttattgagcattattatgcacgaactacaatcttggcacttcctagtaattaactggttgactgctcagaaacccaggaggcagaaccaggcagcctgggtggaagtcctcaatctgacagtcaccagccttcagaacttgggtaagttcctttgacttcaggatctccctctgcacaaaactgggtgttcccagctcacagatcaaatgagataatgcatgcagaagtttagcattgtgcctggcggggagcaaatatctctaaggacagctgtcccagttggccaggaaatactagtgctggaaggtgcctccaagactgccttttccaaggtaccttgcacttccctggggtagagggattttagtgcagaaggcaagtggagcctgcagtttattaaacgatgactacggaggtcactggaaataaggcagttttgtttttaaatgacagactgagtcattttcctgttgtaagagctcaactctgaaacttaataggttgtaatgatgcctcaattagctggaattattgggtatagtggagatgtgatattctggttaaaaatattcttcagattactgaaatttaattaaatctctgaatattcaacttagtattttacagaaatcatacctctctttcttaattctaaatgagaattttgcttattctcagtaaaattttcacgcagatagtacaatactgagggccaaatggtaaaattattctcaggatttttattgcaagtaatcactttgataattgttctcagcacagaaatatttaagcaattgaccatttcatattttggggacagcctgtggttctgcaaagatttcttatttaatgcaaaaataaaacaacaacacaaattttatatcaataggaaaaaaactctgtcttaaattgcattctctggataaatgttttgagatgtatataatcattaaatattctaaataatgaatgttttattttatgagtgaccatggcaaacacacacacacacacacacacacacacacacacacaagcatgcacacaagtagctggtaatcacattgtccttaatttgcatccaaagagggtcagctgattctgagactgattaggagagaaggtgacaggcactgctaaaagagacactttaggagataaactaaaaattggaattttctgaaaaaccaaagaattccttagttgtacaatgttcaggtacttcatcaaatatgttatcaattatccatagctttaaatattctttctgattttgaatcagaaacaaaacctgccatgaattaaattgtatttgcttacacaaatccttttgtttctccaagaatgtcaaatgaaactttattgtcatttacttttaattttattcagaactgcttacattgtcttttggatttctgtcaaggcatggggtagcactttaattagcttaatatttgtaaaagtatttaagagccctttctgagacttcatcttgcataatatagacatcataatatagcctatagaaagatattcctcttgaatatctttctatgggcttatatttgggatgtgaagatgtccatttcccatgaaacttatcacaaattggaccactactgccctttacttttcaataaactatattgaaaattaccatagtagaaactcatatgaaaagtggttggtcgcctggtgtactgagtgtggttcacatctttgggtgcctgccgttgtatagtctagggcatttcactgtatcatgagttagacctgagctcagcatgtttgctctctggagatcctgatagcggggatgccatctccatggcagtcttggaaacacgtaatgcttcacaggcaattgtgatatggaacacttgtcttctaggcctcttcattcccagctcacatatacactcacctctccttcacttacccattcattcattcatggaacacatgccagccatgagggatcagaactgagtaagcctctcttcctgctgccaaggagctcccagaacagtggaggggatgcacatgaaacagactgcagaagccactgggtgggaacctccctgagccatcgccaagagcaatgggtaacatagagggtgaaactctaattgcactctggggattcccatcttcatgggggcagtcatgcacaatctgagcctcaaatgagcaggaatggacaggagaggtaagcatgttacaaactgcctgaacactgacaggagagacgatgacacttgtggactgctgcttgggtaggtatccctgggaaggcgaggcaagataaggggcctgaatccaggtgctgcagctgatgtaggatggctgcattcactaggtcctgagcaacctttgctggacatgaaagattttaaaattagaagctcttctttggtgaaagaaataactaagataaaaagggtgccaggtgtggtagctcacgcctgtaatcccagcagtttgggaggccaaggtgggtggatcacgtgaagtcaggagttcaagaccagcctggccaacatggtgaaaacccctgtctctattaaaaatacaaaaaaagtagctgggtgtggtggcacatgcctgtaatcccagctacttgggaggctgaggcaggagaattgcttgaactcgggagacacaggttgcactgagcaaagatcgtgtcattgcactccagcctgggcgacagagtgagactctgtctcaaaataaataaataaaataaaatgaaataaaagtggaaagttgcttattttgatcaatagagggtgtcattacagaagcagtgcttattcaatgataattaaataaatgtaatatctatctccagtgttacagaaaggccaccaaagtgccccttacctttcaaaggcttagagtctaaatggctattttcccaccaaaaccccagagctatttcctcctttaccctgtgtctctgtactgaatgcatcttttacttctgatcagtgtccgtgaccatgaatgagcttccaccttagacttcccacgactgcatatgtccaccgtggctgacagatgtggggctccctctttggggctaacgctatttctccttctttctttctccttacacaaaacagatattctgaattttatgccataaataaaggcatgttatatgtaacatattgtcctttacatatacttaagatttcgtgtaatagtgtccaattcgattgaatcagtggtgtcctttaaaagctcattatataaacaggccgatgtgaaatgctaagctggtgacagggcagccccaacctcattagtcagttagatcaccggcaagtctgcctgctgacaggccatgccacaaaggcccactacagagatagattgcactcctccatgaacaatgtattcagtcgattcacaatctaatgagagccaggcttccttttaatagtcccacaacatttcaccctttggcactaaagagaaatttaactgcaatgcactgacttttgtggctgctttctacagagagagaaaggatacaatgccttttaaagcctcagaagtttccatttttagttataagagctagatcctctgtggacagacacctctctcatgcaggacccaaaagatccaaaaagcttttgaggccacagtaatacctggtctttttcagggcaaaacacgagagaatgtgtaaagctagtgggtaaaacttcacagtcttcaattcaagacagagtgagtcagcattccatttgtagagtggcgggaatgcgtgtggggttatggcttgctgagcgtctttattctacaatgtgtgtgatgctcgcagggggtggatgtgcttacaaagaccaatgacaccacctcccacactcctcggcctgcactttctatgcagctaaacagtcatatcacgctgcccgctggaaacacaactcattggctgcggttgagaaacgctgacacaaaggggctcgctgcattaacgcccgtaataccaaaggtggtatccgccccaacaatgaaaatccatttttgttacagaggctggtcatcttatgaaagaacccatactagaaggaaaacaaacaaacaatcaaacaaacaaacagatgcaatggttagaagaggtgtgtgatgtgaagaccttattgtagttgttggctgccctcttctcccagtgacgccacagaaaaaaaacggtgaggaaagagacaagaaaaaaaatcacatgccatgagagaaattcagagcggggatagttaatgcaatgttacagaacttttgattcgataataacgttctggatgaaacggaatttggcctaagacagagccatctccaagagcacattcaggaggatgactaatgccatggcccaccaggtcagggccatgctactgacctgaaggccatggaacagtggtggttggtgatgagcttgctccagaatcaacactgcttccttacttgagaaaatttgctatggaaaccatggctgttgaatgaaacgatgtgcttagtgatgcaattgtttacactgtggctcaagctttctttctctcccagctacttccaacaaacactaaagtaaccagcagccagtctgcctctatgggccacacatggggtagcactgccctgggagtcagtggattcaacagctcacttcactggcaagaaaatttaggggctttcttgagaacacatctagttagtggcacagtgaggacttggcctgttttctgccacctcggtggactgtctgccaccgcatgctttgccatttaaaaaaagcaatttgaaaacatttttgctgggatgaaatgagagcatgcagtcagggacatcaattttactatttctgtagagaccactgcttagaccttgatcaagattcaaggaagaaaaaaaaaaaagatacaaccactttattctctgagacacagaatttgctgtaaaagtattcaaaatgtggatacaaatactgcattttaagaaaagggctttcaacttaattttgaaaaaataaaagttttgtaaaattcgagagtcttggtgtcataacactgaacaggagtgaagggctcgccctggggggaaagcaccgagaatacaaatgtttgctgagtttaccttccatgtgaccctgatgctctgagatgatataggctccaggtgaacttcctgaggtggaccatcaggagctgtaaggaccaaaaacccacaggcaggttagagacgctttccggagcagatcgaagcctacacagccaaaggtggtccccgaggacaacccatccctatgtttggcacagagaaagaagtttttagcggtcatgggaaatgtcaattttgtagaattactgtgtccaactctaggcctttgtttatttgctctttggaaacatgaatcttggggacctatcatggtattccttctcaccatgtctttgacaacctcgtgaatcaatcccaattttgaacaaggggtacaacagaaagttgcaaaacaaaatttcccttatgaaatgctgtctatggtgtgtattgaaggtccttctctccccgctggaagctttgcttagtgatgtggtattggggtttctcaattgattagaatgacttcgggcaaaaataatcaagattcttctgcctttgggtgtctttcatggcttttgttcttcaattaaaaacccttgtggccgggcacggtggctcacgcctgtaatcccagcactctgggaggccgacgcgggcaatcacgagatcaggagattgagaccatcctggctaacacgatgaaaccccatctctactaaaatacaaaaaattagctgggtgtggtggcatgcacctgtagtcccagctactcgggaggctgaggtagaattgcttgaatccaggaggcagacgttgcagtaagccgagattgcgccactgcactccagcctgggcgacagagtgagactccatctcaaaacataaacaaacaaaaaacaacaaaaaaacccttgtgaaccaggggctctagccacagagtgctgaagcaatgttaaagaggaaacaaaagtgtgcaatttaaagcaacctatttctgctgagtgtgcaataagtcagtgggccaatgagagacaatcccaattacagggggccaatgagagacaatctcaattacagggagccaatgagagacaattccaattacatcccagttagagctgataggcatgtgttggaaatgtgctacctactaggtacatggtgtagaactaagagatgtaaaacattttgccaaccaagagttcagaatgtaatcagagctatgagatacacacactgaaagaaggttgcaatgcaaggcagcaggaaaacaggtgtcttctgagaagcagaagcaaatgacgacacagagatcagagggaaagaatcctttagattaaaaaatgtttttggattgacaatttttagatcactgcagaactacagaaagccagttctgtggacatttgcaaaaggttgtatggcacacgggagataagaaagctgaagtagtggatatgaactcattttggggagtttggaagtaatgggaaaagtaaagctatcttatagataaagggtagatttggggaagcgcatgactaagggaaagctcccttccttttttataaaggaagaggaagttctgagtagtagcatgatgtagttgctaagttgatgggccatttgagttttttctgtccaagttcacattctggttctatcacttgttggctgtgtgctttttctgcgggttacttagcttgtctgtgactccatttctctctatatataatgggccaatggaatttgtatcatagggttgttatgaaaacaatgtgctcagtaaatataagaaatcataatcataatataattatcattaagtgtttgtaaatagggggaagcaaatgggagaaatttaacaacaacaacaaaaggtaaacttgaaggaataatgaatgtcctggcagaaactgaagagggcagaagatacaggctatggagtgagtggggcaaaggaacaaatacctctgggatgggaggagggcagagcgacgggaggccttaggtaggcttactggttgagggaagccaggtgagggcagacacaggtaaacttactggttgaaagaagcgggttgaaacctgattgttgcttttctcaacaatatgacaataagccaagcaggaaatcagaatgggaacatgaaggagagagttatgggctttggaacaaaacaaagtcttggaaaatggctatggtctatagaaaagggtgcaccctgtgtcttagggcactaaggcgctctatcaaggtgcccctccccaggagtcagtgctctaagatgcagggattgctactccaagaggataatgggactccacagctccgtcctcgcactgaggaccaagcaggaagctgattccgcaggtcagggctggcgggactgggagagaatgatactataagaatgccaagaaacgaagccgattctccagcatatgtggtttgttatggtttagaaatatgagtttgaaaggaaatggggacattgcggcctcgattttccagttaagatgtacttataattaaaacaaaggtgttaaaagacaagagctggagagagaggaggtgggggttaggtctctgggctgtttgttccctgcacccctccttcacacacttgctgatgctgtccctgacatctgatccaaatggcccctgtcctatgctttctccaccatcgtccttatggggatccctatctctcactctgataccccactcccaccccacttctatgcctggtgacagtttctatttagttcctaaacattaattctggtctctattgtactcttttaaaagggacatggccccagagcacaattcacactgttcacccaccctagtaattttctgctcccagaaggcacctcgccgtcctctccacgctttcgttccgcgcactccctatgcaccctgtgtcccagccatgtccaaaacacacgggacccctgggtagagccgagccttttccctggggctttcttctccctccatcagggtttgccgcccatgcctgtgagcctcccgctgcagctgacacctgcctaggcctggggacctgtccctgtagtgtgcatatatgtttgcgtgtctgtctttgcatgtctctggtcacccagcagactctacatggcaccaggaactaagcccagagtgagtccttgctttgaatgggtaaagcaatttgtagatgctgaaatgctgagcatgcatccctctcctcagcaggtccagggacagctggcagtctggagtgctacagcctctcagatctattagttccaaaaatgcaaaggctctgctagaactgaagttaaagtccagaacaggagccgagggagagaatggcttccagctaatggtgatgattattgttgagcctctgcacccaatttcttgcacatggggtcaagctcttaggcaggaaactttggacctcaaattcaataaaaactcatggaatggatttccctcacacacagataattctgtgctcattgaaaagcacacggttttccataaaaatccttgaaaaatgatttttgagtctgacagctatactgaggctgggttactttaatttagttacacttaactgaatttgacaagaagccagtttgttaggaattggaggcaatgtcaggagcactgtctcatcctgaatcctctgggctccctggggcatggcctttggtgtggtcctctcaggaagatggcacacaagagttgcaaccttgattttccagttgagatatattcataattaaaccaaaggtgccagcatagtgtttacaagaatgtccccaattctatcagatagcatacatatcataatgtaatcatgaattgggagtaacttacttttccaatctggtctggtatttattttatttttcttgagacagggtctcactctgtcgcccaggctagaatgcagtggcactatctcgactcactgcaacctctaccgcccaggttcaagctattctcctgcttcaatctcccaagtagttgggattacaggtgtgtgccaccacgcctggctgacttttgcatttttagtagagatggggtttcgccatgttgcccaggctggtctcgaactcctggcctcaagtgatccgcccgcctcagcctcccaaagtgctgggattacaggtgtgagccaccatgccaggcccaggtctggtattttatgaaggtccccactgaagaggagagggggtacagttcttgtatccaggacagacttaactgtttttaagaatgtaacagctttattacttagcctaccaatgctgccatgatttgtcagtaatgtatttattgttctgcctgttccctgaagtgaaagcatttggatccctcctcctaaaaaaaaaaaaaaagtgatgaaaacagtccagacaaaccaaaataatttaatttgtacaaacacacaatagggctatgtccaatatcattaggaaggttttttgtttgcttgtgttttacaaagggcactaaattttctactatgtttctaaaacattactttaaaaattttttaaattataaaaaatttcccttctttaagaattttattgctttctgtataactcctgagctgtaattttttcataggttatcatctcattgccaatgatgcctataaaattacagtccaaagccgattgagtttccaatgcaaaatgtattaagggtcaaaaattaggtatatccatttatttaactaaatttgaaaattgtgttgacattggaaatttaagaatttacttacatggtttcaaatgtaatatatagaaaaagcagaattggcttccccactttggaagccaaagtgggcagatgacctgaggtcaggagctcaagaccagccttgccaacatggtgaaacatggtctctactaaaaatacacaaatttgctgggtgcagtggtacatgcccataatcccagctactggggaggctgaggcaggataaccgcttgaacccaggaggcggaggttgtagtgagctgagattgtgccattgcactccagtctgggcaacagagcaagactccatctcacaaaaaacaagtgattttacaaaataaactctgcatttctaagaaatccaaaactcttcgatctgtaaagcagtaataagcgaagactatctttataatttgtattatgtttgcaaaggtaaaagtcaggacaattcattctgtttggctgaaaacacagggatgacaggcacctcctgattgccaaacgcatggatctccgctttgcttccctgtcctgatccttcctggctacgctgtctctgcttctgtccctccccagctggacaacctcccactgcccagcagctcctgtgtccctcccagagctgagactcaagcctcggtgctccattctgctccaaaatactctcctccctgtctcaatatcttggctttagccagcatcttggggcctcatcattaattgatatgggctcaatcaccccagtgagaaccagtcccacatttttgcctctggttctgattgggagatttgccttctatgtgccaggtcctaaactaggcaaagactgggatacaaaagcagaaaaaaatatataaatttttaaaaagtagtgaggagcagctgcataattctacaaacacacgtttgtcttctacaggagttgggtgggtgggcgagaggcatgctctgtgttggacaaagggaaccaagacagtatttagtaaaaatcaaaatacgacaaagaatagctggtgcccagatggggaaaggctgaagtcatgtaataactacttattaaataaatggctgatttatttaacctacttatttaattagcacatcctatgtgctaaacaccaatctaggtgcctgggatacagcagtgagtgagcagaacaagcaactccacctgccctggtgggatgggatcaaagcagaccataagcaaaataaatcaacaacttatacagtacactgggtgctgatacaagcgactgctagaaggagagtggtaagggaggcaggggacccagtggagtgggcagtgggttgaattttaatagggtggccaggattggattcttggagaataatatttgaaagtggtaagggaagagacgaagaacatttcagaacattccagaactgttccagaacctttcaggatagcagacaggggtatacacaatgtgtatgagggacagcaagaaggccgataactttctttagatttaattcccaaagtttcttcaaacccaggatggaggagaatgacaaaaatctacagaggcagatcgctgagggcctggttggtcatggggtgtgctcggctcttctcgctgagtgaatgctgtgcatttgactcttactgaagaacacattgatgccgccctctgcactaatgagcactgctagccctgtgtttgcttcacatgctcctgacttttattccttctgccctcattccatcctctcccctccaccccagctcagcacataggaaactcttcttccagatcacagctgctgccccggaatgggaggaaagatgaggcaaggacttaactcagtgccagattcattggaaacccagtgactctgcatcatgacccttccataatccacaccttctattctctgatggtctgtcaaattcagtggtgtttcaatgagcacccactaattgaagctgcatgttctatgcacagatttatagtgaaaataatgaagggggcagccatcccaaactcggtcacaaggcactaagtgactcatgacctgcagggggcagctgctaatggggaagttggtctgtagcaagggttagctgtgaatgtcatgtgtcacgtggctgatccgtgtcaaagagacacacttcgggtccattaacagctcatctcattaactccgactgtgtcacttattctcttgactgctcctttgttgtgggggctgctggtgctaggggtggttggggaagccatgaagactgcgctgaatggtgtggtcttggcttcatggctattctctgaggtcgagtgtattaaagtggtatgataacgctttatgcactttcacatgcaacacatgcaaataaactgagtagtttggggttggagcaatgagatttcccaacattaggtagggacactatgccagtggcagcaatcccttcctcactaagctttgcagtagatacagcagaaatctaaaactcaaattcccatggtggccagacttcatcagagatccataaacatttctgtaaagactcagatagtacaaattttgggctttatgggcccatgttattctttttttttttttttaaagatgaaaaaactatgcttagttcaaggtctgtaggtgaagtttggctcaccgactgtagtttgctgatccttcaatgaatggaggatgggaactatggctcactgagggggtatggtcagcctctgggatggccactccatgcttaactccagctcattgctgccaagcaggaactcaagaggaactcaaaatttagattttcagctgaaatttccagattttaaaaattaacatcgaatttaaaagtttcgcacaacactgagccgactcacatccacaggcctggtctgtcgtgggctgcagcttatggcctgggacatgccctattccatcaggatgcggggagggcacctcaagctccagatgcagccatttcatgggtggtcactggagctctgatgggggctgtattctttccccatcttctttcctctcagccttcctgtcctatctttcacctttctctacttttctgcatgaagtccttgtcttagtcttttggggctgctataacaaagtactctaaactgcatgacttatacaccacagaagtttatttatttctgtttctttttttgacaaggagtctcactctgttgcccaggctggagtgcagtggcacgaccttggctcactgcaacctccgcctccagggttcaagcgattctcctgtctcagcctcccaagtagctgggattacaggcatgtgccacaatgcatggctaatttttttttgtatttttagtagagacggagtttagccatgtcggccaggctggtctcgaactcctgacctcaagtgatccccctgcctcagcctcccaaagtgttgggattataggcgtgaactaccgtgcctggctcagaagtttatttcttacagaaatttatttctagaggctgacaattccaagatcaagatgccagatttggtgtctggtcagggctcattcttctggttcatagatagtgccttcttcccatgtcctcccggggcagaaggggtaagtgatcttattgggccttgggcctattgtataagggcatactgatgctattaatgatgggtccaccctcacttcctaaaggccccacttcttaatattattgcattaggaattaggtttcaggatattcatttgaaagggaaggcatgaacattcagaccagggcacccttcagaatttcactgtgggtttaatccagcatatattttctcaacacacacatacacacacacacacacacacacacacacgcacacacacacacacgcacacacacatactctgctcattgtgacacccattctaaaggcaatactgtgggtaatgtttataaacgttcatctcatactttcatctcccttatgccagacacacacaagggacagaattgtaagcacatatgccccctgatgtggagggggccacagcccctccacatcaggtggtatatcatcatggacagcagggtccatgaagacatgatgatacacctcaaaggctactgtcagcaaaatccctcctctgtcctgagctgagtagtccctaactacacatgggagatggaaaaaggcattgcaccagggaggaaggcattcttgaacttgacttttcaaggaagggcacagaaaaggagacatggaacttgtagtgccttcaagacaggggaagaagcacaacaataggggtctgggagcatgcaaaggcaggtgagtgctgggcattgggctctggggagtcactaagtgtcattgcaaagtagtagcattggggggcatcctcgtgtgcccaagacttgggtactagattacagtaaaagtgagtgggctgacagcttccggaggctcccatatgaggaataagggaacagtgggacaaggtcacctcaagacagctacagctcctaaaaagatgtgcctttgggtttacctgctgggaaggggcagcagtgtctacagcccctgctcaatactctaatgaggatgcctttggccagagcaccccattctaggtaagtcacacatgggaaattgactttttaatttcagtcatgcaaacctatgaaccaagacaaagacaagttatctgctgtagcttttcatttctagaacctgctcctttccttcccttccccttagctcctctgaatattaaaggagaggggctgtgtggggctgccacagccagcacacccagatacaatacaaaaggccagcctgggagccaaagaggcagcatctgcatctgtctgcagacatgccaggcagctgccctgcagaccagcaccccagaggctcttcacctggccttctggcagggagagagctgcttccatggcaactgccagccgcagcagaggtcacagaggaaacgaagaaaaaagcaacaacagcagcattaataatggcaatcagaaaagcaggtgcaaaatgcaccaccggaaaaatgctgttttcccgaggaggtggctgggatggggcgagattagaaaagggcttgagagagaaggagaagattgagcaggaagtcagagatgacattttgggctgaaggatggggacagcttattctccctaagtacccagcataatgaaatctcagggatctgaggaagttagtgggttgtttacatacataattaaatacaattctattttttgcagaagcagattaacacttatttcccacttatttctgagacatgcaaagtattttcagagcttgagtttttttcagtgatcagatatgtctgtgtaaggagcagaaaggcatcataatgtccattttgcagatgagaaatcatacagagaatccaagtctcagaaatggctcactctcaggcacttcagcctaaagatcttctgtcactcactcttgaaaacaattttcaagaactgacatcttccagcattgaaaaatgggcattcctctgcagttcaggaagagttgtacattttaacctattctcttgaagacaacactgattacagatatcagaagggtgaaaatgttgcatttgattgatccagccatctgacttcttaggatttaatctaagaaaatgatcttggagatagcaaaagacataccaccaggatgttcattgtagtggtgtttatactaatgaaaactcgaaaataattgacccgtttggcaatatgagatttgttaaacacatagtgagagatatcattacaaattgtagaaaagtacttaagagatacataagctccatttatatttgggatgctgttaatgagggtagcagagatgaggtggtgggaaggaagccaagatcaacctctcttgaaagttgcaacaaacctccggtcttctgttagccatctgggtgtggcaatcaccttaatcttggtgatggagaaacagggacttgagactaagctgccatcttccctgcagtagggagtggctgattgctctgatggtgggcaggaaaagaagaggtaggtttgggagctggacaccctttccctacaataaatgggccaggcatgcaatccttgtggatgaaacccaagcgcagtggcttcctctcctcctgccaggaggcgggctgacaatcagcattcatggaccattgcctgattgctcagttctctgcacacctgttaatttcacccccccggaaacatgagtggctcgcagtgtgttaaggggtgtgaatacactggtgcgtgcctgtgtgcatgtgcgtgtgtgggtgatgaaattatttagccagttatcactgcctgttcctgggttagctctcagtgggaaaatgatggaagctgttttgccttctccacaatgcttatctctatcttctgaatttgcaacactaaatataatgttgtttgtaatagaaaaaagagcaaaaacattatttttaaatattgatgtttctagtcaataaaataatctgttccccttcccacatctcccgcacagtaagcatgcttgcagattcctagttaagcattactgcttcctcccacactggacttcacagggtctcaggaaagaaacacactcacggttctcctgtcaacctggattccatgtgtccaaacaaaggaattgtaaaacggcatgattctttgaatctcaccagattgttagcctcatacgtctttcttttaagtcttgggtatgggaaacttgaactaaatcctatttgaagagcagtgccttcaaagtaagatgcagagcgctgtctgcgttttttatagggcacagaactacggagagcacgcatcaaagacctccgcctagcacgggcaaaggtctgcttctgcatttaagcatctgagccctcaagagttagctcccgggctcctctggagcaaggttccgcccggtcccacgtacctgcctcgtccgccgtgatggtgagctcgttgctgggctcgctcttgccaatccggttcttggcgtacatgcggatgctgtaggtggaggaagggtggatatcaatgatggtggccgagttcagctgaggggaaacatctttggttctctgagcagaatcccaggagtcttttgggttttgtttttcaaaaaagaagagatagagacgtgagtttttttcctctgcctttgaaagttcacaagtaggaattaaaaaccaaaaaaaaaaaaaaaaaaaaaaaaagacggaaagaaagaaaaattacactcaaagtgatttctgaatgcaatgttcccagctttctggcagagttggccatcagaggggatgtgacatcccacacacattattcacgctgcgagggacatggggcaacaagccagctgagttcagggaggggtgatggaggaagcacagatcagccgactgggggagatctcagaaggcaaattccagtggtggaagctcaggttagtggaatggacgatggccactgtaagcactcattgtataggacagtacaatgaactatggtttggatagtacccctgggcccccccaaaatccctggcatttgaaaaccagcaaaacttcaagccatatcagatcctttcctccccaaatagagtgtggtaaaaacaagataatcccatacaaaccaatctcaagttccagaataaatcctgattaccaaacatattttttcagttctattttttgaaatcatttagtgccaaatccttggttgtaggaattatttttcaaccacagctaattataacagcagcacctactttgtgtgaaatgttatcactgaatctgtgacattttgtatctggtggttttcaggcttcaagcaaggatgagaatgtcaatacgtggttcttatatcaaaagagtttgggcagttgttgactgtaggtgtgtggtcgacagctggtattggctggggatgaaaaaaggagggcccaagacagtagacagagatggtgcctacatattcccaccctcctcagggtctgccttggtggtgctcaccacacaagtaagtcttccatggataatctgaatctgtgttccctgctagactttaagctccaggagggcagaggccatgctggccatacccagtcttttatccctagtgctagcacagtgcctggctcatagtagacaaatagtacatgaatgtttaatagaggaacaaataaaccacaaatacatggacctctgagtcttgggaatggggccaatcactttgtcacactaagggtgagtatggcagtttaggggacttctctgtccagagttaaacataaatgcaagagattttctggaattgaagaaaaaatatgtggcttaaagactgcttttggatactgtaacttctcagagaatgaagcctaatagaatctgacaatgaatattgcagttagaaggaaaaagcatatttggggtcaagaagattagaggtggaaaaacatgaaatacaaagagttggaaaaaaattgacaaggggaagaatgggattcaatggaagacaaatgaggagaggaaattttatatcaatgaaacggcacacacctatgaggcttgtcccacagagagaaagccagaccttctgcagagatgtttaggaggatgaggaggaatgccaggtgccacaagatgcagagacatttgctaagtagcccctggaggaagtaggcagttgtggtggttgatgcctctgcccaggcaacattgaagtttctgaaactgacggggccaatgaagatacagccatcttcactggaggctcttgtctgggagttggcaggcagcctggagaggcatatgagtgtccatgactgcagtcccttacaccaatccaaggcatatggtggacctgggtagggtggggacagtcccctcttggtggtcactgggcacctccacatccatgccctataggttcctttagctcagcccctatctcagtgatgtcaccttgttcaacagtctcccagtgtgacttataaatcctctctgatgctgcgtttgcaccctgtctgtagcaactaccactaactccctccaatgggctgggggacccgttacaaagcccatcctcaccctcctgtccgtggccttcccagactctccccagtcacacttgccacttttcagatcttggatgtccatgcatacatttctgtttgtgttttacgcctaagaacttttttattgggtcaatggtgcattcttcctagttatatttatatctcaattttcagtttcctcctcccatcaggtcaatgtgctgggcattttcaaacgtgacttctgtggccccaaatctgtgggcacattggaaacaccttggggctttttgataattctgctttcagacctaccaaaccagagtctctggggaatggtgcccagaaacctgtgcttttaaaaaggctccctatcttggtcattccgatgtatagtttggacagactgcttcatttgattaaaattgtacaacatcctgtcaaggtaaggtttttatttccttagtgaaagtcaagaaactcaagccctgttacatagctggtaacaagaagggctgggatttggcctcgcctgtgttatctccaagttcaaggtcatttttctgtaatgcatgacctccacatactctctgaaaacacctaataagacaggattttgatatttccgggcacctgctgaaaatctcgtatgcctagaagaagaccttctggcaaattattgacttgacaatgcacagaaatcgtttggtcaaatgtaagagaagaaaactttggccaagaatgactgtaccatctgtgggtttgtaggaagactgagagggctgtataggctcggagttgcagcctggtttaggaagatgtcagaagcattcacgaaagagtgggcgggatgccatggcttgctccagggagactggtggtgtaggaggatggggcagttcagagtcccactgcagcctctgtgaggtgaggaaggagtgaagagctgacaggagccagtgagactgcgctgggtgcttgctggggagctcgccttgggggtcagataccccaaatccagtggatgcaagagcaacaaggactaatataagagagtggacttggtatgaagaagtgctgttagaggctaaagaccagaatgagtgaaggtgactgaaagttctggaggtgaattacatgaaaggtttaacaatggagaggtagctgggagagggagcgggcccttcatgttggtgaataggaggaggtgtggggacacaggagagccccttgttctctgtcttattcttctcaaggataacagtcctcagggtgaactaggggtgggaagaccaagagaggagaggggttggggtgtgcaccttctgtgtcagagtctgtgtttcctggttacctttcagggtgtgacagagcttgccatggtgctgaaacctggtcagagacctgtgagccaccacggacaggagggagggacaagagaaactgtggacaggacggaggcaccggagaaactgtggacagcagaggccaacagagaaaccgtggacaggagggaggtaccagagaaactgtggacaggaggggccagcagagaaaccgtggacagaacgggccaccagagaaaccgtggacaggagggggttaccagagaaaccgtggacaggggggggttaccagagaaaccgtggacgggggggggttaccagagaaaccgtggacgggggggctaccagagaaaccgtggacgggggggggtaccagagaaaccgtggacaggaggggggtaccagagaaaccgtggacggggggggttaccagagaaaccgtggacagaacgggccaccagagaaaccgtggacaggagggggctaccagagaaaccgtggacggggggggttaccagagaaaccgtggacagaacgggccaccagagaaaccgtggacaggagggggttaccagagaaaccgtggacggggggggttaccagagaaaccgtggacagaacgggccaccagagaaaccgtggacaggagggggctaccagagaaaccgtggacaggagggggctaccagagaaaccgtggacggggggggttaccagagaaaccgtggacaggagaggcaacaagagaacctgcggacaggagatggcccccacaggaacagactctgaagggcaggctgccttccaaggaagggaataaagggaggcaacaaactgcagacgaatctgctggaggtccccagacaatatgctcgaagggatgttaaaggtggccttgggtccttgtaggggagaagcagtagtccctgggaatcagaaaatatggcaaccaaggcaacctgtgtaattgccacctatgggagaagaagaatgttccagataaggaagggacagcttcactgtgcctgtgcccgctcagatgacgcctctggtgctgccactgggcatgaccagagttaggggggcaggagatgatgacaggagatacaataacaaggacttggggtgttcagtgtttcctggaaaagagtaaaccaaggaaagtcatctgttgtcaaatcctgggaggactgtcatttggccaaagggttaagaggtgggaggagagacactggatccaggaaggtctattttggtgcaataaatgtaagaacttgtagcagtcacagctggccaaaggcagagctgtgctccctgggttagtgagtttctgtttctcggattgttcaagcatagagtgaatggtcacttgcagaagttctttctgttacgaatgtgaagtactttaatacattggttatatgctgctttctttgaaaattaatgaaaaggaaaggaaaacttttggggggataatttcaccgttgcctaaaacagatgttgagagtcaacaatttgactaatggttattatgagtctcgtatacatgtcaggcactatgaggggcacagggacatagcataaggtttgtcagagacaattccagccctcagggctcactatggcccatagggggacaactgttcagtggggtgcagatagtaaattaatagtcacaagcccaccaagtgttccaagacatgctatgaatagtgaaggggaataggtagtcagggaaggcttcctggaagaagtgacatttaggctgttattaatacttgaaggatcagttttctatgtactcagtctaaaactacactcacttaaattatggttgtaatttttatacaccaaaaatttctggaggaagaaactaatacatgaaaaatctgactaacacaactcgtacagcagtgagtacaggtgctatctactctcagcacagctccttcctcccagggcttccaaactgaaagtaattgaagttctgtagggtcctggtagagaccttggtcatggacttggatctgcttgtcctgtgggcttttctcctgggacccatgctgccccttaaaatgacttgctccagggctacataaacatcttagccacaccactggccctgtctctggttgaagtagggcatgaaggatggaaaagagtatccctcaatcccgcctgtactcagctttatagacaaggagctttcctgctttggttatataaaccatgatcaatttatacatttaaagatgctgttgataataatgattcttagatttcaattgcatgtaaattaatgcaataaacatttacagtatgctcttcacttgacattgtgctgggtgctggggatcccaggacacagagaaccagagtccctgcctttgggaaactcctgggtaagagtagggagatagtgaggacacttagatgctgagtaagtagtttaacacagagggttttagaggcattttactcctaagtattttcctgcatgctggagcaatctacaagctaccacctattagatgttgagtatgctccagacaacgaggaaggcgttttcaatgtcttcccttcttagagttcaccaatttccattgagtgtctccacatgttgggtgcggtgctgggtgttggagaaatgagctgggtgaaaatagacctactaggtgcagggagcccccaaggagcctctagcgtggtggaggtgaaatgcattaatcagcatatttgtcagtaatcatagagatacatatatagtgacccataatgccacctgcccagattgaaagggagaaggagctgggtgagcacctgagaattgagatctatggagggggtagtaactgggtggctcagggaagggaggactccaggcagagggcagctggtggcctttgtggtctccttgccagtcctttgaggtggatgcagcagtgcccacttcacaggtgagatgcgcaagcgagggtgcagagctggtgcaacgcaggcccagcagcgaatcccacacaggctgggtcccaaatcactgagcccaggcctgccaccagcatccggcaatgcccgctcctccatgaggacaggggaggtcctgggctgctccagtaggagaggtctcctgtgtgctcccgcaccaacagcatgggcagcctgcagccccatagccagtgcgcagccagtgagataaagggctgtccctgtccccacggtgctcactgcatctgtctgagctctcatcactgtcactaagttccaggacagtttctgctcaaatgtgcctgcctcacctaagaagcatttgcttcacttcaagacctgtatacatgaacttgtaagaaaggcaaggtcagcctctcctccctgggcccttgggaaacctgttggtcctagtccccaaaagatgcttgttcagctcagcactgtcttgggtgagccccccaggtcactgtgcctcacccctgagcccagggccctggctctgcagcatttcttggctacggtgagacttgcagtccaatcaaccccggaaggcccttcctcagactttgtgtaagtgacacctcacttctaggcccccagttgcaactcagaggccgatgacctgagccattccatctttcctcatgtgcatttccaacccagcagtcacagatactacttttcaaaacactattttttgttttgatccatatcttctcaatcttcaaattctgttctcctgaattcccgaagagtcacccctcggcttgcctttgcagtcaccatttcctggctctgttcctggcttgctcttgctgaaacatttcctcactcctgacctgtggttcccagctgccttgagcttgattttttactacagctttagtgccaaagatattagatgggtcacaactgggtaatctgaaataacgtgcggtatccaggaagtgaaaaataaagctgcttttgcggcctagaaggattttattaacccttcccatgctggtggtgctcgaattcctcatatcttttatgagacacagtaaaaattctgactagaggccactgtggtggtattctaccctcgcccaatgcatcataaagttcaaaatggcccgggcattgttccttgaaggcaatgaatgggcacacctgcagcggccctggcagcagggtcagttttatttatgggctctgggccgagtggtcctgggtgcagcagccagtgtcgccgatggtccctgagcatttccaggaggttgctccagagtgaattttcctttttctgcaccaaccaccactgcacagtttatccgaccaacaccaagcacagcttgagctcaacgctctgggtgcaggacatgggctcaggctctacaaaagtcacccagctcgggaaacgggaagtgaagggagcaggtgaaatagaaaaggtcatggtgggggcctgtctccatcagccactgcccacatgccaacaggaagctgcaatatcaaggagtccagcaggaagcaagactgaagtctgggctggctaaaaaagaaagaagcagagctgagcctcaacacgaaactccactcccacagcagaaagccaggatgtgcttccagcaaggagactgggggaagtggtgccctctgagctcctgtgagctgagctgtgcgcttacaggtaaaacacattaataaggagaaaaataaaagaactttctgaggtggaagggaagctggaggaagtaaagaacttacctgatttatttttgcattcaatatcgtagcctgtgatgggactgtttccatcaaaccccatggtccacctgagcgtaattgtgcgtgctttgacatctttgatctcaatttcgggagggtctgggggctctgtgccatcaacagaaagactacgagttagttcaaacagagctctgacataaaacgctagtggaaatgctgagcgtgactcacaaacgatttgtctgcattagacaagaacagaagctttttatttggaagcattttctttttcctaatcacattttagggaagagaaattccactttcccaagacttccaattttcatagcccttaagaactggaccaagcctggaggatataaaatgtcacgattctagtttggatctctaactcaaaacatattttggccccaaatgttaaacttccctttcattctggtcatctagtacatggattcctaaaattgagcaaagaaattccaccgctgtacttgtgtgcatgtggcttgactgtcatgggcttgtcatcttgactggttcctctaagggcttcgttccctgtttgggggctttactttgacataatcccaggcactgcaaaattctgctttagcactgacattatacatattcaaaatttcctgggaattaggaagtgttacatggcaagttgaggacacagagatgcctgaggctgagcatacagctcccatcctgaaatgactgtgtttattctcttacgctatcgtcttcctaccttgcactgtgagctgaattattccacggtcctccccataagaattaatagcatggcaggaaaagaaaccagaatcttctctcacagttggcaaaatctatgtgtaaagcagaaagaaattcatctttttcagtaggcaaaatgactttgagccgtaaagctctctctctccactctttcagttctcctgccatgccaagcacacacataggtacactcacacacacacacacacactcacaaaacccccattcctccagactcacatactaaatcacacacatgcacgtatccctctgaggacaaattatttcagtgtaattgaaagtaggcggatggataggattcacgtacattatccatgtcaggtgtagctcattaaattggatgtgtaatttatataagatgtcgtggtcagcttgacatatatcccacatatacattttttttttcatggtatccaaagcaaccatgcctaaagagacagattaaatactgcaggcagggctgggggcccgcaagactcgcatcagattccttttctaggaggattccaggaatggacccttgtctgagagccaatataagcatttcaaacacagggcttccccacctccccaccctgtgtgtgctacagtatcatcctccaaccgcatgacaacagcacaaaccagttcactgctcacagtccttttctctagcttttgtgatcctcttttaacgacagattttttttttattgtggatttttccaaagaagcaagatagtttttatgataatatttttgtcccaaagcccatctcatttttctttttgcaggaagttaaaacatgcacacagcataggccatcattcctgaaggattaactgtcatttaaaaaccttatttctcactttttttttttttttttactacatttgggttccctgctgcgttcataataaccctattcttaataacacttaggctgaagcactatttttgaaggctacttcactaatctcgctgtgtgaaaggggagagaaatagtgcttcgtaaataaattccgaaagattatctgctacttatctgcacccgcttctgtgaaaggaaagacttattcttccaataaagttcattccattgtgttgtatttgccatgcttttacctgcagagtagaaatcacctcttctcccacctccttggtggacacaagataacgggccatctcagggttaatgattcggtcctccttctcccagcggactataatgggcttctcaccatgcgccgtgcagctcatctcctttttctgcccctgcgtggccagggtagtatttggataggatgttatcatcgcaggaactgaaaaagcaaaagggacacaacttgttcagcaaagcagggttcttgattttccctggcaaaacactcaggtaaaccatgcttcaagagatatttcttcaaaatgaaatttattcaagaaactgctgcatgagaatctcgagcaaaataaaggaaaggcaccagaaaaatgaaacttgagtaagtgagccctcagcagaaattgccatgccgtttcatatccacggcacgttgctcttccaaccctgttgagggctatggcctatgtcccttagcacacccagaatgattgatatgggttggctgtgtccccacccaaatctcatctggaattgtatgcccataattcattcccatgtttcatgggaggaacctggtggggggtaattgagtcatggaggcggatctttcccatgctgttctcatgatagtgagtaagtcttatgagatctgatggttttaaaaatgggattttctctgcacaagtgctctctctttgcctgctgccaaccatgtaggatgtgacttgctcctcctcgccttccatcatggtcatgaggcctccccagccacatggaactgtaagtccattaaacctctttcttttgtaaacagcccagtctcaggcatgtctgtatcagcagcatgaaaacggactaatacaatgatgttactggtttctaactatcattataaacaatggggataaaacttccacttttagtcaactttaggtgaatcccttgttgctgctaaccagtccttgtaaccacttttcacaatgcccatctcccacagttgttataaaccttgcaaacctttatcagtcactggagacctcaaacctgtccttcttccataacttatagcagagaatctcgtctccaatttactgagaaaagggaaccctttatttgtgaagcttctcaagtttccttttcccacatcaaaattaaaagaagtctaatacatagacttcttttcttggcaatagatgacaaaagatcccaccccaattccacaagccacttataaattgtagactgcatatgacaaacaccttttaaaatgcatactaagcttatcagaaagtgagagaaaaaccagagaccaaacacaaaagctgatagtgaaaagccagaggtaatatataatggcggtgctttgactacctgagaggcatgacattaaatatgagacctccaaagccaggctcctcaaagggttctatcttgacagaaagtatataaccaaaataataataacaataaataaaaatccacaaaggcaaagagagaagaaagctgcctcagcttgtgttatatatgtagaaaaacaatctctcccctgagaatttataaaactggcctgactctacataggtctgtagtcaaattcatgctaaagctttaacatgaaggtgaccgtaatttgataatggcctgaggagcctagcaaaagctaacatactctagaagaatgtgtcctctgtccaggcccactgaaatgcacccagataaagccctgctggccgtgagctcacaaactgaaactaaagaacacatgagaaaactaacaccatgattgagaaccagcctcccaggacttcagatgatacagttgtcagatacagactgcaaaataactatgcaagaatgtttaaagatattttaaaaatatgataaaggaacaagatgttaacaaaaaggactagaaaggtttgaaaattcatcaaaacataacaacctttttatttgctttttatctcatttccccaatcacaggaagaagctcccttcccccatttctgaggtcaagctcagactacgtacttgattgcttgcctcgtaagacttccaaggtacttgaccatagaaacactgtggcttcttctaagactggcacatactgggtcatgtcttttcccatggcttactagagaggtttgagacatataatgaaacgtcaaaatactaccagttccgtagcctgaacacccacagaagaacctacatttgggagtttctctagagtcagcagccatgtggcagagatgtgccccacagcactgaccgtgtaataagatggaaagtaggcaaattggtgactcaagaaagaggtgccaagagtcctgcatatcaaggacagttgctcacaactgttgtgaaattccttttctggcatttctgagatgcagcaaaactggctgtactgtccccagcctttggttctgatcccccccttcccctagcctataaaataaataaaaatgtttatttttattaatagctttattgtggtataatatccataccataaaattcacctgttttaagtgtgcaattcagttgtacacttaatattgcattcgcttcctagagtgcctgtaacaaattactagaatctatgtggcttataataacagaaatttcttctctcacagttctggaggctggaattccaaaatcaagtcgacaacagagccatgctccctctaagagctctagaggaagacccttccttgcctcttccagcttctggtggccccaggcattccttggcttgtggcggcaaaacttcagcttctgccttatcttcacataatttacattcttctttgaatgtttctgtgtcttttcacatggacttcttatgaggataccagtcactggatttaggacctaccctaatgcagtatgatctcttcttaacgaattatatttgcaaagactctatttccatataaggtcatattccaaggttctaaggggacattaatttttggggatactattcaacccattacaaatatatttatattatccagtacatatacatatataccattataacctgtatacaaatatacacagttgtataatcatcactgaatcaaatcttaaagcatttacattaccccaaaagatttctcctgcccatttgcagtcatttctcttttccccctcaagttctaagcaatcactaatctaccttctctccctgatatggtttggctgtgtccccacccaactctcatcttgaattgtagtttccataaatacaattcgtctcccatagtgtcatgggagaggcctggtgggagataattgaatcataggggtggttacctccatgctggtctcgtgatagtgagtgaggtctcacaagagctaatggttttatgaggggctttccgccctttactctgcacttccccttcctgccgccatgtgaagaagcatatgtttgcttcccctttcaccatgattgtaagtttcctgaggcttccctagtcgcataggactgtgactcagttaagcctccttcctttataaattacccagtctctggtatgtctttaaaagaacagactaacacaatacccgtattacctttttagatcattttttataaatggaatcatatagcatgtattctttagtatctagctttctggatttttttcactaagcataatgttgtcaaggttcatccatgtcatagcacagtactttgttcctttttattgctaaatgatattgcagcacacggatatactgcatttttttaaatccactcacccactgatgcacactggggttgtttctactttggggctattatgagtaattatactataaatattcctgtataagctgttgtgtgaacaaatgttttcatttttttccaggagagattcctagaagtggaactactgggttatatggcaatttcatgtttaacattttgagaaactgccacactgtttgaccaagtggcagcaccattttgcactcttgtggccggagattggagagagaagagggaataagaggaggtgttaagattcagcatttatggtgagggaacaagaacattccctttcaaccatttgagttcaacaatttaagttcaaccatttgaattcaacaggggaactcaaagagtagagattgggtgcacctataaaaaggtgagctggcatgttcctcgacagctggaggcttactggctgtagaaaccccaggctcaccatggatctgccatcacagaggaactgaaggtggtggcactttctgtttggcctcaatccactaatcaagattttttctcatacgggaaagaggctaactcaagataattagagatctcaaagccaacaaaagtaacctaaattacaaaactgtgaataaataaattacaggcctatgaacaagaaaatatttactcctcattctttctctcacgactggggaatgtgaatcagaaaccatgacacccacatataatttagctttgaaaggtgacccctgtccactaccatcaacccccacgccccaattcctgatgagtgtcctgattcctgcaacaccctcatccttagaataaaatatagaaactcttgttgcaaaactgaaaatcaatccatgtttaatgcctcccagtctcctgggcatctcaaggctatggtcaggatttcctattttgcagtgtttgtaaaaaggaaatgtataaaatggtaagacataaaaacagacagttttcctttgagaacttggtaagtcaccatcatcacctcccaaatccagggtagtttaacactcactgactatattccaatgagagcaagccaattctgaagtaagggtttctgtcctattctaggagctccaaggctggtgttgacccagaatgtaattccctagtactttaaaaccaccaactggaagaactgttctccaaaaactgcagcattgttttgaggacttgtttgttttcttctcttttccttttttaaaaaaataatcacaagttttatcgcatttgatgagagaagtaccttggccaaaccatagacctctggtttgtttatgacttgcccatcttaatctgcacacaatactcctcagttttatttagatttctactttgaaagagtgccctactaaaatgggtatttttgttctggttattaaattcagcacttagagagaaatgctctgactagcccatgttctcctatccagctcaagtattttcagccctttaaagtaatggtggaaaggaaaaaatgaatcattaccatggcttctttgcaatgctaatgtttgaaggcatgaccttttcacttgtcacagttatggatgcctagagatgacaacatgtctgtacagcagccctttttgcgaggatttctgaagcataacaaatggatggggtaatttaacagggattggtaccaaggagaggctgtgggcaaaccctgctagcagggccaagggagatccagacccaagaaggctttgtccaaaggttgtgtgctgcgtgcctctcttgcaaaattacccattgaggaaggtgctgttttacatcatatcaatttataaatttgcttcataaactataatattatctaacagcatccttaatgctcagtaaatctgtgttcttatgatataagggagcatccctctgacctacttttttgcagcataaagatgcagtggtgtagtggagctgctgtcattggccagggagatctgattgtgcacatctctgcccagcttggcagtgcagtcatgtctctttcccatttagcttgaaattggcaatggtggtagtatttataccactgaaattggcgagtgctagaaatcacggctttctccatcctctccccctcaatagctaattgttaaacatttaccagaataatacttaggagagtgtttcactatattaataattttaaagggtgttcccatcgtacaagagatactgagaagatagtaagattaagctaagagcaataattaactttatcaatgaaagtaaacccttatttattaattaaataattaaaatatgaacagtttgtcactgtacgttttgacaagtaattcagtgataaattgatgaatatcttaattttttaaccctaggatacagagagaatgaaaaattctatcaataaatcactgatattaaagactggttccaaactttactctcaagtcttttaatgactctatcaataatgcaaaattaatccttatacatttttatggtttttgttcctacctggttctgctgaaaagaaaacagattgaaaagaaaacaactgaaaagaaaacaggagaaagtaccaaacagcctggataatcccgaatgagacaagattcctgtcacaagcatctggctcaatactttcattttatagagaagaaagggtgtcaaatgcccaaatacaggagtccatcaggatctgactctgatcggtcctatttgaaaaccatcatcgtcatgatcaccccaaacataggagatggccaactgtcccagggtgtccaggacttccagtgttttaacacaggaagtctgtatcctgggaagtttctcagtccctccaggcattcagagcagatatggcagaggagggtgtggagccaagaacgaggcagcataaacctggcccaatgcccaagatgggaaactgaggcaggaattacagggttcccgggtgggaggtcaaaagaaggagatgctctgggacataaacacattttaaagctattttttcaagtcccttttaaaccagtcctcccaaatttttattatgaaaaaatttcaaacatacaggaagccaatcagccatgtatctactgcctggattccacagttcacactttaatgcacagtgttgaatcaaaatgtgttttctttgttatcaagatttactgaatacattttttttattattctattttaaaactaccttgggtaaacacatacatcagcgtgggtctcaaaggtcgagctgtaagatggcagccacctgcctggattctgcagctcagggtgcagacccactggcctcctggtgtcccaggtaaaggaactgccgcaccctggcctgcagaggtgatgtggggttaggtggtgcctggggtagagtggtgcccctcacatatgtcttaccaaaaggaaaggtgaggaaggggcctgggagcagagaatctgactccaacctcctgccgctgggactgggcaggacccttggccgtcctgggttttggctttctcacctgagtcatagaggagctgaatgggatcacgggctctcaacctggcctgtatctcggaatcacctagaagcctttaaaataggccagtgctcaggccccaccgcacgttggctcagagtccctgggggtgggggttatgcatggatttatttaagtttcccagacgatcctaaaatatacagcctggattgaaacaactcaatccgatgatccccaaggtcttttcccccactaattgccatttcccctccttctccttttttctttatttctttccctctatccttctgttcctccctcccaattttttcttcatttttcccttccttccttcttcactttcccctctctttcttctgtttcatcctccctctatttctgtctcctgcttttttctgttttctccttcacagtgccataataacaacaatagctaatttttatgagtgttgactgtgtgctaagaacttttccatatactgcataagtatttcagccatacgacatgatggaataaaaacactagccatggaaatgacccaagacacatgagtactattttaagttgattctaaattatgctataaatagaagtgagacacatagacaaaacatttccagcagattaattggatttgcatctatattaacaaaggtctatgcagatggtcaaatagaaaccagacaccaaacaccgcctttaaatgggcaaaaataaagattagaatataagagaattttggaattaatttctacttgacatcttctcccctttctccttaatttctttctttctttctttttttcttttttgagacggagtcttgctctgtggcccaggctggagtgcagtgtcgcaatcttggctcactgcaagctccgcctcccgggttcacaccattctcctgcctcagcctcccgagtagctgggactacaggcgcccacaaccacgcccagctaattttttgtatttttagtagagagagggtttcaccttgttagccaggatggtctcgatctcctgaccttgcgatccacccacctcggcctcccaaagtgctgggattacaggcgtgagccaccgcgcccagcctctccttaatttctaagtaaggaaacagagaactagggggtttaagactggaaatgactagacctattccccttgcctctctcctatccctaatgcaaagttctattttatttagtaagtttattaaaaaatcaatattaccataaaagtaatacagtaaaatgatcttcattaatccctaaagtgatgaatctttcccatcccctctcttcccttctctttcctccttccttcctccagggtctggaaagctaaatggtagtagcagcacagttagttaataacgcatctgtccttctgtcctttcacgtctcagatcattttcatatcatgagcttgcagcaacacatgtgtttctcagtggagaagggattcttaattccatttacctataattacctaggatggggaaactaagtaattagcctaaagtcatacaactagtaaatggaagatctagaaggagaatccaggtcttctgattccaagtgcaaagcctctttcccttatagtagcggaggaggccaagggtgcagagtgtctgaccacaggggtatctgacagcctgactgtcttcaagcctgaacacccttggaagcccctcagtctggggcctgagtccatttacaggagactcctcataaagtccttgaaatttccactttctcagctgcaaggcaagacccaaacatctcccgcaagcctattgcatatttgtagaattaagcagacgagactggctacacaatttgcaggacccagagcaaaatgaaaatatggaggcttttgttcaaaaagcaggaaaaaggtgccattaaagttctaaaatataaagctttttccttccttctgtggtctccctctctccctctgtcatgatggcctttattttttatttaatatcccacttcctctggcatggtgatactggctggtcaagtgctgaccctccctaactcccagtaacagccctgtgacttggcatgcacactcatgtgccccaccacatgcctggatccccaccatcatcatacccaggccagggtggggacgtgtagtcaggcctctctcagtcgaataggtgaccttcagtgacctggagacccaccctgcccggtcatcctctgtaaactctctggtactgccacctagaagcagggaggggtgccacacccagaaatgttacaggaggctgtctctgaccttctccacatacttacccagatccccatggactggatgaccatagccattgctgggcagttgcaggaaaggggagcctggggctccagggggcaggaaagtgaacagctgaaaacctattctggagaggcagtgggaggtgggatgacatgggagctgtggctccacataccctgttcatgctccattgtcacactggacttcacttgcaaaacacaatttcaaagacaaaattgttaagaattcaagatggcggctgcagataatctttggcttgtgggactggactggtcttgtaccgatgatgctgtccctgaatgtcaggacagtactccacttcctaggcagcctctactgcttccagtagaaagaaacagcccaggtaccttgagcaggaggggaataagaagagctgaggagagggcagtctcttggataagacttagatatgagtaaccacaatctggaatctgaagtagggagcccactctgcccatcatgaaggcaatgggtacagaggcaagccttaatgagggaagtgactaatccacttgcaatcaacatcttcccaagccactcaatacatcacgattatctttcattaaacctgtggtccctattccttacatcacctgggagccataaaaacacccacagtatgctgagaatgatgacttccagcttcatcccctggaaaggataagatctcattcttttttatggctgcatagtattccatcatgtatacatgccacattttctttatccagtctatcattaatgggcatttgggttgtttccaagtctttgctattgtaaatactgcagcaataaacataagtgtgcatgtgtctttattgtagaatgagttataatcctttgggtatataaccagtaatgggattgctgggtcaaatggtatttctggttttagatccttgaggaatcaccacactgttttccacaatggttgaactaatttacactcccacccacagtgtaaaagcattcctatttctccacagcctcgccagcatatgttgttcctgactttttaataatagccattctgactattctcacttataagtgggagttgatcaatgagaatacgtggacacagggaggggaacaacacgcaccggggcctgtcggtgggtggggcaaggggagggagagcattaggacaaatatctaatgcatgcagggcttaaaacctagatgacaggttgatgggtgcagcaaaccaccatggcacatatatacctatgtaacaaacctgcacattctgcacatgtattctggaacttaaagtaaaattaaaaaaacaaaaaacaaaaaacacccacagtagtatcttcccagtcacagcgaatacttgctgtcctcaggattcttttttttttttttttggtaaaatacacataacaaaaaattggtcattttggtcactttcagtggacaaagtacattcttagtctgtcttcaaatcagaacacccttggaagcccctcattctggggcctgagtccatttacaggagactccccataaagtccttgaaatttccattttctcagctgcaaggcacattgctgtacagccttcactacaattcatcccccaaactttttcttcttcccaacctgaaacttggcaactcttaaacaatccctattctctccttttcctggcccccaggccctggcagtcaccattctactttccgtctctatgaatttgacttctctggggacctcctataagaagaatcatacagtatttgtctttttgtatctggctcattttacttagcataatctcctcaaggttcagtcaagctgtagcctgtgtctgaatttccttcttttctaagcctgaattatatttcaagatatgtgtacacagcatttttttaatccagtcatctgtcaacggacacttgtgttgctttcaccttttggctattgtgaacactggtgtacaaaacattattttttagagtctgtagaactttgctagagaaaatggcttgagtctttttgcctgtttcttctcaagccattcaaaggccaagcagtattttccctgtttgtggtctctgcctctcagtttcatctccgtttcctcatctgtaagaacaatgagacctgccgcctcctaaggctgtaatgaggattaatgagattatgttagaggaaccctctgagggtgttggaagaatggccccacagaaacaccaagtgtgattatccctgctgcagaatcaaaaatttctcctgtccaaatacttattgttcataagatttcggcaagtgaggctgcctactgggcagctctaatccttataaagaaaatgatttttccagccaggaattaacaaattcttagcacatactaaaatatctcctcagctgggttattatgcttacataatgaagttacttagattataaccgttaatcaaattcatgtttccaagctggagtgggtcatatttgatgctaagcttgaacaagaatgacaacatctccacttcctggcagcttttccaggcccttatgacatgattgaatgtgtcaggggaaagacgaagaacatttagggttcatattacattcactctgaagttatttcaagtcacattattggaagaaagttgatttattttttaagacaagtatgaatattaaccaaaagatatcaaaaacagtattttcctctaactcgcatggaggcaggctggccatttctttctttttttttttccatctgtctggttctgtacataggtactatattttgcccaataagaaagcttcttatttatttatttattagacggagtttcactcttgttgaccaagctggagtgcagtggcatgatctcagctcgctgcaacctctgcctccctggttcaagcaattctcctgcctcagcttcccaagtagctgggattacaggcatgctccaccatgcctggctgattttgtatttttagtagagacggggtttctccatgttggtcaggttggtttcaaactcccaatctcaggtgatccgcctgcttcggcctcccaaattgctgggattataagcatgagccattgtactcagcagaaaacttcttaataattatgtagaaaaaggaaaatagtaaatagattttgatttcctgccatcaatgatagtaaaaaaataaagaaacaaggaagaaaatagatcatgtcatcctgaaaaattgggtaagtgctgtccaggatattaattgcagcaaaaatatattatgagccatgggttagccagtttttaaggtgacctgtggtaatctcatctcctggaattcaaactctccacattttatcactctgagaccagattataaaaggactgtagcttctaccttctacttgggtgccccagttctctctctttctgtctgatcacttgctccagggaagcctgccatgatatcaccaggatacccatgtggcctatggagaggaccatgagaaggacaagtcttgggccaatagcctgccaacaaccctgtgtgggagctggggggtggattccacccccgccacccttcactcttatattcagatgcatttcccagaaggcaagcagtttccatgtggcttggggacagacacagagttgtcatgtctgaagccatgttctaacttttgagcagctgctttatgtacagctgtttttcatggagaaacagagaagataaatcatcatccccattagcactcaatggggtggtgaattctaccatgtcttgtctccatcacccactgcacagcacactgcctgtggctcccagccgttcagtgtgctgtgtcttctggaagctgggctggttatctccttgaacaagtccttcggcctctctgtgcctcaatttctgtacctataattacagcaccccctcctagggttgctgtagagattacaagctaatagctctttagggtgtcccagggatctcctctacctgaagattcttgtccaaaatgggccaacgcccagtattttgatccttccttcaacgttataatctccaccatatttctgattcctaaagtttcaccttttccttgaaaccactctgaccatgtgatcttcatctgtgttaatattcattttccactgtgcctcttcattcaagcattagtggcatgattccattggcttgcatgtgatgcccatatggtttttttatttggttatctggattgtatcatttatttcattcctttttcatttgactatgctagtatcaaggacataaatgcccttttaaaaacatctggtgtaataatgaggatgataattatagctaatatgcattaagttctctgctgagaaatgtattagcttttaatacctacagcaatcctaggaaggaggttttgtaaatatgagtataaaaattgaggcacagagaggctaaatggcttgttcaagatcacacaggtagagaggagcggagccagaattttaaaccatgcagcccatctgtttcccacctgggtatggatgcatgaacaacttggtacatccttggctgcttttgaactgtatgtaaaataccatcaacctttctgcattcatttgtgtctggcttctttccttccaccttatgtttgcagatatctaccatacatgtatagtacctgttgtttctttccttttatacacagagttattatacagccctgaaccagcatcacctgggaacatgctagaaatgcacactctggggtcccacaacctgtctgaatcatcccccacctgggggctgctttacatctgttctttgtggcatccctcccctacccgtcacccagagccttgttttctagtaccctgcgtgcatattgcagaagcagctcaggctttggaatcagcagagctaactttgaggttttttggctctgccaattgataagctataaaattaggtgggtatttatgttctgaatcatctatcaaatgggtgcaagggtgatgcccacctcaatagagagaagcaacacaattaaatacatgcaaagacctttgtagattataaagtgcttataaggttagttttttttctagttaatatttgtgttcatgacttggttttctaattacattgtacattcctgtacggctaaagagcttttcatatatatgtataggcaaggattgtaagaaaaaaagtgttaagataatgggatcatacagatttaaaaattttaaatatttaatgtggtttttataaaggttgagcaataaataaaatatgtttaaaagtaaatttcacttatgtaggttttaaatgaaatattaatgaatttgataaataatataacggttgtgtccatcatatcacgtagaatattaacaacataggtaaaagataaaaggaaaacaggggtgttttaagtgctaacttttgttaacttgttttgaagagaatggggtgatggtctgcttactttccaagaatagggttcccagtggtgttttcaaagagattgctgctacagattaattgtagggcccatatttgtgtgcgtgtgtgcacacacatgtacccatgaatgtgcctgtgtgagcacgtgtgcaattctatgcatgtacattcattcttttgtgtgtgcctgtgtgcatgtgtttgcgtggatgtggatgtgtgtttatgttcatacctgcctgggtgtctgctggaagactagagggcaatggctcctaaagacttttaattatcttgaaacctttctcccaaattttgtgtgaaagccaagatgatgcatttttattatgtttattagaaaataaatatacaactatatatttcttacttatttaagaacgttctcataaaggaaaaccttaaagttctcagatggtctctataaccttggcctattttataggtttgtggaagggacaactgacttagagaggctatggagatacaaaataacaccaatggttttgcagatagaaaagcacctcttctgaaagaataaggaatacacccagcctgtggaagccagaaccagcgcctttactttcataattcaaagtgggggcgagattcttctcatgtaactgaactgtagtattaatgatacaaagagatggaggtcgtatcctagctttcgagtaaatgccaacacaagcaagtgtgtctgcacatgcacacacacagtcacatgtgcaactaaaaccagtgctttttcctgctttgtgttatgggcttatgagccctgcatccagcagtgaaatgggtaaacagatgcatggcacatttgcaggaatacattccatgtaactgttggcaggctgcaccccttctgtgtcttctgtttatgtcagttgatacatctttaagaagggggaaatggaaggagcaaggaattgttggcaaacagcactgttaatcaggaggtattttatgacccagcaactctcagggggtttttaaagttcagaggctcatgaagagacatgtgtaaaggtccctcccaggggagacgaacagacactaattgaggtattgacggctctaaatgaagcagaaacctgctagaagattcagctccaaggaagatgagtgctgccaagcagtgcatgctgggggccttagcaggtttcattcactgctccttcatgcaagtaagtgtactcttgggcctggtgcagtggctcatgcctgtaatcccagcactttgggaggccaaggcaggcagatcatctgaggtcaggagttcgagaccagaccggccaacatggcaaaaccccatctctactaaaaatacaaaaattaactgggcatggtgatggtagcctgtaatcccagctactcaggaggctgaggcaggagaatcgcttaaacccgggagatggaggttgcagtgagctgagattgcaccattgcactccagcttgggtgacagagcaagactctatctcaaaaaaaaaaaaaaaaaaaagtgttctcttgaacacagaaacttgtgcctctcacagcacaaggtcccaagctaaagagccacaaaaaatgatctgttgaagtattaaaaatatctccttgatcatgtccccaattctttgcctcggtgaatattatattgtatatttccccatatgcacatataaaacaggcatataagatatttaagcatgtttcaaaaacattcaaggatagtaaataatgtttaaaagcatcacctatagtttctcctgaagaaagattgttgcactgctctctccatcccatttagggaggatttatgcaataagtattggaggttttaccacatttggccttttatattcgacatggaactatctcacccacagaggctttttggcattggcagcagcacctgcttcctcttagagagcctgggatgcccaaagcagagggaactgtgaaatctgacacaacgtgtaacctgtgctctaactgtatctctctgaactccacccagttctaaggatagtaatgtcagtgcgtctaggtaaagagacctttgaacacccgtgtgagtctgtgtgtgcctgtgtgaatagcaaatgagctgtcaccagaataccttcatcccagtaggtgtgtccctaatgacaggaacaggatgtgaggatgaatccactggaaactgctggggaaaagcacctgaggccaggggtcaaggaggcagctctgggtagcagagcagaggctgtgagcatcctctggagggcatgttagcacacgggggtaggcccgacctgtggagctgactcagtgggtctaggggggactccagaggctgcacattctacatgttcctgaggtacaatggtacagctgggtaggtggtggaggagggcacacattgagacccagtgagaggaatgggtgcctccagcatcaaccatatttcctgggccatttccacatagctatttggatgtgttatatcaagtaagttaaaactctgcttttattttttaaaaatcccaataatgtggtagtaaacatttctaatccttgcttttcctgggatttgccaaaaaaaaaaaaaaatgttcaaaagaagcctgggcaacatagcaagaccccatctctacaaaaataaaataataaataactgagcatggtagcacatgactgtagtcccagctagctgggggactgaggtgggaggaccccttgggcccaacaggtcaaggctgcagtgaactctgttcatgccactgcattccagcctgggcagcagaacaagactttgtctcaaaacaaaacaaaaacaatttaaagaaaatttaggtgatttattttccatttcaagaaaagaaagacattgcatgcatgataccccaggatagaaaccacaaagatagtgcttagcagatttgacaatgcatcctgctaaagattctgtatggcaataaacatgcaaacaaataaatatggaaaacaaaatttttaaaaagtcaaaccgaaaaaaaattgtaactatagtaaaaaagtattattatgcaataacataaatttataaatactaaaaacaatcccagaaaaagtgaaaaaggatagagaattcattaaacaaatggaaatttcaatattaaaataccaagatattcaaattctttctataatttctttaatttctgtgaaattttcttgccattgcagagcagatgactgaaagtgtccagtttggtaggaggtggggactggggtgctggcactctagtcttgcaatggaaatgtctgatggtacagtcttctgggaagccagtttggccaggtgtaaaaatatgttgtgtgagcagatcttttgaccctgtaattccttttcttgtattttatcctaggaaattaattagataaatgtgcatagtttatgtataaggatggctcattgcaatcttattgattataggagcctttaggcacaacataaatgttcacagttacttaaaaagtaattacacatctataagtggcatattattcagcccctaaaacacaaaaactataatgtaaagtctcagaaagatagatctgtgttcatttgctaggtctgccataataaattatcatggattggcctcaataataggactttattatctcacagtcctggaggctcgaggtccaagaccaagttgttgacagggttgattcctcctgaggcctctctccgtggcttgcagataaccatcttcacctggggtcctcacacggtcactcctccatgtgtgtggctacacgctaacctcttcttagaaggacaccagtcagattagatgagaactacccttaggacctaattttaccttaatcacctctttaagcctctatcttcaaatacagtcacagcaggagttgcggcttcaacatgcgaattttagggggagacacaagttagttcctaataatacctataatacattatcaatggaataaaaatggaatccatggagtaatagatttagtgtatgttcccatcaacaaatattcctggttcaaatttgagcagcactggccaggcatggtggctcttatctgtaatcccagcactttgggaggctgaggtgggtggatcacctgaggtcaagagtttgagactagcctggccaacatggtgaaacctgatctctactaaaaatgcaaaaaattagctgggtgtggtggtgggtgcctgtaatcccagctacctgggaggctgaggcatgagaatagctcgagcctgggaagcagacactgcagtgagctgagattgcgccattgcactccagcctgggcaacacatttctgggctaaaccgggccacaattccattgtcacagaaagtggcagcgaatctcaaagggttttcggttgagcatggagaatggctcactgagctgttgctttcattgttttccccaaggatcttggagtgctgcatgctctcatattctcacatggtcaggagttcttactcaccaggaaacagctggggaaagaagtaacatgtcctctctaacttacatgtgaaggaacattttgagtatgacgagaacatgcagaaagatctcctgacataactgttatccgtagggggttccatttagccctacacaaaatccccttgggttgcgaaacagaaatatggagaggcagctgcggctttcactgccctactcctccctcctcttaacctttcatttaaaaatctaaaacaggccaatctgatcctctaggaagattaagaaatttttgctggcaataggaagcatgcaactaaggaaaaagccctcaaaacaaacagcccctcaaagatgaggtctgagctattgtgatttcttttcagaagctctaagagcaagacagctgacagctaaatgagcgggcactattttgagaactcgcattcaggattaattgtaggggtgaggttctgtgggctcagagaggctgcctgtagccacgaggacaatgagtgattctcccctcatcgtcttccacttgggactctcagagctggttgccatggttgatgaagtgaagtgcacatgcttccgccttgatgacagtgagtgacaggaggttgttaaggaagcagtgggggaggatgagtgagaaggttatgcagggtgtgtggccaaccctggacctgtccagtataatgccaggctttgagcaaaatgccaagaagaagactggatgaagtgagaaactactcatttcatagacgttgcatggcgatgcctgcacacacaagactcctacatttctgttcttcctcttctgctctcttttccactcttacccttgctgatctgacctgcttgggctgtctcgattatttcttataaagccctgaccactctctcctgagctgctgtctcccatctctggaggtcagccaggtacttccatttggaaggcacaccatccccttacaatcaacatgagacagatgaaatgtggcacctttccttccaagctttctccctgtccctattcctgtcccaggctcctccttggatggattccaggtccccaaggcaatcagtggcctggtccttcttggtcaaggttcatagcatcatttaaattagacttgtcccctctaggcccgtgaccatcagcttactgcaagccataatcaggatgcctgtgctgggctgtgaaatggcattataactcatcgctcattcatcttccttttccactccagtctatcctagggctctgccagactcagcttcctcacatgcaacttccagtatgatatcctctcacttgcaatttacaatgtcttcctgctatttacagattaagctcagttttcacagcttaaaagttaagacgttttataatcttgctgcaacctatgtttccagttacccactaactccttctttacccagacattccaccccagcactcaaacataccttgtatgtttctccacctcccccattccctattttgaggtctgagaacatggttttccttttccaggtatgactggctggcactgttttgccattctgaaaattacctccagttcttcaagttggatttcattccaccttccaggttaaactcacgtcctacctcctctatggagccctccctgacctcacccctacaaggggctctcccttctccaaactcccacaactttttaatgtatatattcacatttattgcacatatatatcttttggcatttacttttacaaagctaaagttttgcaatacagactcctaggaagttgcaaaaatagtagagtcctgtgtgtcctttagcttctggccatgttgtgaatttccatagctgtggtgcaatatcagagccaggaaacccacatgggaacattcccagttaacattatccagtagactagatgccttcatcttttattcatttatttgttctttaagatggattctcgctctgtcacccaggctagagtgcagtggcacgatcttggctcactgcaacctctgcctcccaagttcaaatgattctcctgcctcagcctccccagtagctgggattacaggcatgtgccaccatgcttggctaatttttgtatttttagtggagatagggttccaccatgttggccaggctggtctcgaactcctgacctcaggtggtccatcctcctcagcctctcaaagtgctgggtttacaggcatgagccactgcacctggccaccttcattatttttaacccacattcatttgtgtgtatgtgctcgtgtagctctgtaggtgtatacttccgtttaactttatcccattacaggtccatgtacccaccaccaccatcaaatgaggaactattccacaccacagaagaattccttattcctatctgtctgtgtttgcacctggccccatcctacccattgtacctgtctactagtatccactaaggtattctccacctctgctgttttatcgttttgagaatgctttataaagataactttttgaagttggctttttttcactaagcgtaatgcccttcagactcatctaggttattgtgtgtgtcaacagttcatttcttttgattgctgaatagcagcattccaaactatggatggaccatagatttttcaaccattcacctgtgagaaacattcattttgttgttgttgttgttgctgtttgtccagaatttagctactataaagaaagctgctatggatatttttatataactttttgtgaacataaattcatatttctttgggataaatgcttaagagaacaattgctggaccacatggtaagtgcatgtttagttttatgagaaactgccaaagagttttccagaatgtctgcaccatattacatacccaccagcaatgcatgagagatccagtttctccacatctttgccagcatgtggcgttataatttttaaaaaatttttgttgttctcataaatgtgtagccaggcatgcatttttgatgtgtagacctatccacctatccatcagggcatgagtcaaacatttccaaaggcagtgacttgtccttggtacagcccatgatgcatcagacatgtagattctcaccaaaatacctatggaccaactgccttctatctagaagtgttatcacactttccactgcatactctgctaataggcacttttatccacacctcattattctcctccatcattgccctctggattgtaaactgcttgaggttaaagatgatgtcttaattgtgtagaccctaattgttggcaaatagtagctgctacacaaatttgtgtgtgtgtgggttttgttgtgggagactgaaattctgaagcttttttttttttggtgtggggggtgggagggagtcttgctctgttgcccaggctggagttcagtggcccaatctctgctctctgcagcttccgcctcccaggttcaagcatttctcctgcctcagcctcccaagtagctgggattataggcgtgcaccaccacgcctggctaatttttttatttttagtagagacagggtttctctgtgttggccaggctgatctcgaattcctgacctcatgatctgcctgcctcggcctcccaaagtgctgggattataggcgtgagccactgtgcccagtcaattctgcaactttttttattgcaaagaaggaagggtgctcaaggcatagagaacaacacagaggcctcaccttgagaggcatagccatggggtttagattgaacatgaatttagttttgatacttaagaattctaacttcatgttcaatctaaacaccatggcagccctggtctcagccttacctctgcagtctagttgtcgcttggacagtacatcctttcccagtaacgagatgacacacccctgtgcatatttcaggctgctttctatcttgtttttcaccattctcacaccaagaacaccaaggtttgtgaggcctctgttgtatattgtgacaaagagcaatttatatggttggcaataaagcaggttttttaggggttgatatttttcagtttaattttcatccctttagtgggttgaattgtggtccttcaaaaatatatcaacatcccaacccctggaatctcagaatatgaccttacttggaaatacagtctttgcagagttaaagaaagtaagaacctctagataaggtcatccttcattagggtgggtcctaaatccactgaagaatgtcatataagagacagaaaaggagaaggcacagagacacaaaaaagaagccatgtgaaggtggaggcagagactggagtgaggcagccacaggctcagcagtgtgaagggttgaggaagcctctggaggctgggagaggtgaggaactgatgtgccctcagagcctccagaaggcaccagccctgctgacttcttgatttcagatgtctgtgagagaagaaacgtctgttgttttaagccactccatcgtggtcattttgcatggcagacctaagaaacggatgccatcttcaagatcatttgaacagtatagaaaaatgtatttcacaaaacttttacttattatttcacatttttaaacttcatattccacgttttgctttattttgggtatcaaggcttctagggcatattttaatcaccccagaagcatggacataataagacctggttaaagagtgcactgtgagtgagccatggggtgaaggatcctgctgctgcctcacagcctcctgcctccctgtgcacacataggtttactgtcaggactgtaatgaggtttgcatgaataaacagctttagaaacagctttcaagtttccaccaaaatacctgttaggaagtcttgtttccaccataattgctaattgcttacctacatgtgacctgggtatccataatgcagacatgagcaacacatgattgtagaaaattctaatttaaattattacatttttatttgggttccacgcagaaaacatcttaggcagccactgcagattatttctagaagcgaagggaaacctggcttggagatggagtgggtgagaagctagaagggaatctgttaaggatgccagggatggaggggttccttctccatgaaaataagtggagtcaaggaggaatccttgaggcagcctctccaagacatgcaggatcatgggttttgactaggggaattttacgatattctagtgcagggatataaggaggcaatgtccagggaacagggctcttcccccaaagacagaacccctgggtccctcatcctttccgcatcttctgctgtgtttggtatccaaggcccttggcccagccatttggagtccactcaaatccacacctacatggtgaggaataaagggagacaaactcattggagtcattgcccccatagagcttcctttcctagacagacggaaacccagcaaacacacgaagcgagacatcaggcaatgagtgatacctgggtgtagagaacaaggcatcccttctattcttgctcctaaggatttcaggtagtttgttgcccagcccacttaggctataaatgctgctttctctccaactagtcatagctatcagccagcctggccactttggaaataagaatatttaatgcactcatggacgtgggagcctgtgttctaagacattcttactcagtcatagttagctgagactctaaagagtggcatatgtaatcaagataaaatatgaagtgtgcatctggtatattttggagcctataaagaaagattctgtgctgataatatttacattgggtttttcttgttgttttgtttttccaagatgatggaatataggcattgttagcattccttttccacttggaaagataaaatagtgtgtagagattcacactgtgaacttttttccaagaaggaacacaggaccgtaaacagctttgaaagaagctgtgagtagcagcctacaccgctgtctttgggaaacaccactgaacatgtaaggattcttatagactacaggtaaagggtggaaaaagagatttccagcaaatggaagccaaaaacaaggagtagcgattctgatatcaaataaaacggacttcaaagcaacaacagcaaaaaaaaaaaaaaaaacaaaacaaaaaacaacaagaaaaagacaaaggtcactatataatgataaaatgaccaattaaacaagaagatgtaacaattgtaaatatatatgcatcaaactccagagttcctaagttcttgaagcaatcagtatatcaaaaagacacctgtacacatgtttatcacagcacaattcacaactgtaaagatatggaatcctcacgcctgtaatcccagcactttgggaggccgaggcgggtggatcacgaggtcaggagatcgagaccatcctggctaacaaggtgaaaccccgtctctactaaaagtacaaaaaattagccgggcgcggtggcgggcgcctgtagtcccagctactcgggaggctgaggcaggagaatggcgtgaacccgggaagcggagcttgcagtgagccgagattgcgccactgcagtccgcagtccggcctgggcgacagagcgagactccgtctcaaaaaaaaaaaaaaaaaaaaaaaaaaaaaaaaaaaaaaaaagatatggaatcaacctgagtcctcatcaatccatgaatggataaagaaaatgtggttcatacacaacttacccatgtaaaaaacctgtacgtgtaccctctgagcctaaaataacagttggaaaggaaaaaaatcataaaagcaagactcaactaaaaaaaaacaaaaagaaaaaattgtgatatatataccatgaaatgcaacccagccataaaaaaaaatataatgacttttatagcaacttggatgaaactgggggccgttattctaagtgaagtaactcaggaattaaaaaccaggtactcatgctctcacttataagtgggagctaagctataggtatgccaaggcattcagagtggtgtaatggacattggagactcagaagtggggagggaggtgaggaatgaaaaactagcagttgggtaaatgtatactatttgggtgatgcgtgcactaaaatcctagacttcaccactacacgattcatccacgtaaccaaaaaccacttgtaccattaaaactaatgaaagaaaaaaattaactaattaatttaaaaaccacactggggagtccctgcatgctaagtaggtagaacaaatcaatcataaatgactgccattttgtctacattctgtataaaaaaggtgaaactgctccttttcttctcctttaaaaaaaaaaaaaaacaactttggtatttgtgctcaagactactatgggaaggacccagttataaacatgcatttcacgccaatatttcttcttcagaataagtgctaagcaagtcaagacatgcaatgatttcttttggcctcctataaaacaaatgagccctttttgttttgtatttgttttagagacaggatctctctgtcacccaggctggtgtgcaagatcatagctcactgcaacctcaaactcctgggctcaagtgatcctcccacctcagccgtctgcccaagtagctaagactacagtcatgtgtcagcatgcctgcctaatttaaaaaaaaaatttttttttttttagaaacagagtttcaatatgttgcccaggctggtctttaacttatggcctcaagtgatccttccacctcggcctcccaaagctctgggatttcaggcatgaacaactacacccagccaatgatccatttttttatgaaatttatattaaactggttgctttataaaaaaagcttttaaaaacctctagaggcaaagtccgtctattttagaatcttgatagaaatcataggcttatctacatggatatctataatcaacacctattaatgcatcatcagttacaaaaccaaagtgagaactgtgagtataggaaaatgtcaatactgtttaaactagatttatgcaaccacaaggaatatcacttaaattgttcatcatagagcagattttgcacctggcagatgagactgttgtcacagcagcacaggtaacacccagcagtaaggccaggaggcccctcccgcagccaaccagtgcccccatgagaaggcagccactgccctacctcccccctggagctgctgccctgttagaatgtgatggaacagacaggacaccttggcagggctaagtgaccaatgtcttttcttggccgagaatctcatgtcatttgcattatttttcaaagtcggtcaccctaagtagaaaacaaagatggctgtgtctgaaaaactgaacacaactaatgattccattcccaggccagaaaagggaccagtggacagatttctctcctcaaactctaaaacacaacctggctttctaaaagagaatatctgttatccctttctcaaaaatgccatgacaaagattttcatcatttcaagattattttatatttgaagtctcagaagactatgtatatatcttattattgtattacatttcttgattatatttttctgattgcaaatgaatagaagcttaatgcagaaggtttgaaaaatgcagaaaagtataaaaaagcatagaaagatatcattcataattgtaatactgagagaagcaaccattttaacaagcacattttcttctatctaaaaagatatgatttctgagccttgtcaacataatactacatatatgtatacatatacttttcaaacgtcctgctttttttaacttttattttaggtttggggtacatgtgaaggtttagttacataggtaaacttgtgttatgggggtttgttgtatagattatttcactgctcaggtattaagcccagtacccaatagttgtcttttctgctcctctccctcctctgactctccccactcaagtcttccacaatgactgaactaatttacacttccaccaatagtgtataagcattcctttttctccacaacctctccagcatgtgttatttttatactttttaataataaaattattaaagtcattctgactggtgtgagatgatatctcattgtggttttgatttgcatttctctaatgatcagtgatatcgagatttttttatatgcttgttggccacatatatgtcttcttttgagaagtgtctgttcacgtcctttgcccactttttaatggggtggtttgtttttttcttgtaaatttgcttaagttcctgattattagacctttaccagatgcatagttttcaaatattttctcccattctgtaggttgtttactctgttgatcatttcttttgctatgcagaagctctgaagtttaattagcttccacttgtcaaattttgcttgtgttgcaattgcttttggtatctttttcatgaaatctttgccattcctgtgtccaggatggtattgcctaggttgtcttccagggtttttatggttttgggttttacgtctttaatctttcttgagttgatttttgtacatgttgtaagaaaggggtccagcttcaatcttctgcatatggtcagccagttatcctagcaccatttcttgaatagggagtcttttccccactgcttgtttttgtcagctttatcaatgctaagatgattgtagatgtgtgaccttatttctgggctctctattgtgttccattggacgatgagcctgtttttgtaccattaccatggtattttggttgctgtaaccctgtagtagagtttgaagttgggtaacgcgatgcttccagctttgttctttttgcttaagattgctttggctttcaggccctttttttggttccatatgaatttcaaaaatttttttctagttctgtgaagaatgtcatttgtagtttgatagctatagcactgaatctgtgaattgattttggcagtaccattttaatgatattgattcttcctatacatgagcttgggattttttttttcacttgtttgtgtcttccctgatttctttcagtagtgttctgtaattcttgttgtagagatctttcacctccctggttagctggtatttttagaaatgttattctttttgtggctgtgaatgggattgcctttctaatttggctcttagtttggctgttgttggtatataggaattagtgatttttgtacattgattttgtatcctgaaactttgctgaagttgtttatcagctgaagaatcttttgggctgagactatgaagttctctacatatagaatcatgtcatctggtttgacttcctctcttcctatttggatgccctttatttccttctctttcctgattgctctagctaggactttcaatagtatgttgaacaggagcagtgagagagggcatcctcgtcttgtgccggtttttaaggtgaatgcttccagcttttgcccattccatatgatattggctgtgggtttgtcatatatagctcttattattttaaggtatgttccttcaatacctagtttattgagagttttgaaatggaatgagtgttgaattttatcaaaagcctttcctgcatctattgagataatcctgtggcttttgtctttagttatgtttatgtgataaatcacatttattgattgtgtatgttgaatcaaccttgcatcctggagataaagcctacttgatcatggtggtcaaatcctgctttttaaaaatgcagctatattatacgactgcctcctatattaagaaaacttatttaaacccataatttaaaattaccacataatattgaattaggctgatgcaccaccattcacagaagcagtcacttcattaagctatttagagagaaacaattttttattattttaaagttctgtcttgactctttctacataaatatttgtctataacttttatttctttggtatagataattaagggtgaaattaatgagtcaaaagacattaactgtctttggcttttgatatattttgtcaaattgctttaaaaaattttcctgccaaatgatatatcagaatgtaaatatttgtgcatctctgccaatattccatattatcatttattttgtttctctatatgtttattaataaaaccaataaccaacaagtgaagttaaatgaatttttttgagtagcattctacttcataaatgtttgtaaattaatacaaatgccaacaggtagaaatcttacatatgtttacttttgttatatatacaccaaatagcatttttgaatatgtttggtgcagttcagacataaatattctatacttccataaaagatactaaatagctgtggacaaaaagaaaacgggaatcaaggctatctaaggagttaatggcttaactttttctaacaaacagctgtaaactgttttcaacgttttgccaggttagatttgatctttggttttaactgtgttatgggagccttagcaatataaaactgcctttcaacatgacatcctgtctctctcacatccactgtggcctggggtcctggaagcaggctttgggaagatgtgagcaccttgtgtacacttgagggagagtcattgtctgtgtgtggccagctacctctttctccatgaaccaacctcgagtggctatttccaaacgtagccaagtcaagcattagaagagtttcatttaaagtgaatatacatgtctgacttaataaataaaatgtagaaggaaaatacagaatggactgtacaacaaaatattcactgaattcactattttgtctcctctgaaaacattctgtatttgtaagaataaccttagcctgggttttgaggttaagacatttggtattcaagagataaattagcttatcccactttttaattaaaatggttttcctccatggtacataaatagactataaagaaatttgatgttatgcaaactctgctatgataaactctaacactgtataatctttaataaaaagtctccacaattttggtgccacacagtgatgaggatgtattagaatagctatatgagactccccatgagagttcacagcttaactgtgactgaagaaacagatgcaggacacaatttatttccttgtattccaaggtggatagaggtattgtgcatgtgtgaaaagcggtaggaaatgcagcaggctcaccctagcacccaaccaaaaggtggtcatttatccttctgcgctcatcactgtgctcactgggccacgaggctgcacaagcttacttttacaacgtgttgtctgaggtcactccatcaatggaggttttaatttcattaatctctgaaccatcctaggaggtagctttgtattatctccatttcacagatgcagaaactgaggctcagaggtgctcagaaacctgctacaattcacatggctagtgagaagcaaagtaaggatttaaattcatttttgcctgactatagtacctctgtttattattatgcaagagttgtggagtgtcaaacaggatgaaaaagagttgagagcctcaaagagttgagtagagtgaaaccatgaataatagacggatctctcccagaactacactacctgtcccacccatgccaccaccacactacccagcctgcagagggcattacaatcagacacctgattggattactcagatccaagatctagataacctgaaaaattatttcatatgtatatttatatgtataataatgtgtacgtgtataatacatatatgtataatatataaatatataatatacatacgtaataggattattatataaataacataaaatatatatgatatgcataatataaaataatacatattatatataatatacatataaatagtaatcataagattgttttgtatcaactgatctcaggtacagtccaacaacacctgggatccctgatactttttcaaaggatctgtgagatcagagctattttcagaataacactaaaaaattatttgcctttttagccaacagtacaaaagcaacagtgggcaaatctgctggggccttaataggattcaaggcagtggcaccaaactcttctcacggccgttgtggtcttcacaattgtccgtcaacactcgcaacaaaaacaaacgtggcagcttcacttcagcatgtccttgactaagcagtggaaatcatttcatttcattccatctcaaccattgagggtgtgcgtttttaacattctgtgtgacagaatggcagaaacatacaaagcacctgtgtgttgggtgctcaagaaaagctccagtgtgggactgaatatgagctgatcagctgtgattttcatggaacacatttctacttgaaagaaaaactgataaactatttttgtctgggtatttgacaaacattttctcaaaaggaatgaagtgagcctgtcacttcaagggaaacaactgagagtgtttgttgccagtggtaaaatttgagcttttaagtcttaattcgattttagaaaacttggattcttcaccacatgcttaacacaccttcccaatatttaaagatattttggatgacattagtagtgatattataaatgtgattttcaaaagtattgtataatggagtgcatcaacatttggaacgtctacattactaagtgaataaatactttccaaaaaccaatgcatggtgttataaaatcatgcatgtgtaaaagatccagaaacactgatatattttaatgcaatagggtaggaaaaggctgttgatatggtttttggttctgcatgggaattaatctttaaaaaccaccgcttgccaaattttggtagagtatcaaagagcaatagccatgatgatctgaaaatgctattaagcttccctgtccaactacacctctgtgcgaattgtattttcttcatatgcttcaacgaacataacacatcacagtagattgaatgcagaagcagctacaagccagacttcagagattttcaaaaaatgtaaaataattcatcctcttctcaccaatttctaaaaatagtttattaagaagtatatttatgataatatgtcatagttgtcatttaaaaaaatatctcagtgtaatctctagtacagcaaatattgatagatccaacccacagaaacaaaagccctttggaatcttcaagaatttttaagattataaagtggtcctaggatcaaaaatcttgagaagtgtccttctatataattgagacaattttaaagtttgaaatctatactgatctgtattaaagatctaaagtctaatggaagtttcttagaatgagggccaaatctgcaaatataataaactttaatccctggaaatgttctttgctcaatattcttttacccatgaccacgctcccctccagcatccctaccaacctttgttcccttctcaggtgtgtccggtgtggcctctctttcccctcctgacaccaggagacctgcccagcagcctgccctcagtccctgctcccgatgtgggagccaagaggaaggtgcaggattggagttgcctcctgagactcaccctcagagcagctttgaggaggtccccaggctgcagggccctgaaccccaggtaacacctgaacatggtccttagtcctgcaacccagagaccagcccatcacttgagcctgagagcccccattcaagtcatttctgagccacgttgaacttgccatcatcaccgctttcattccagctgctactatcctaagggaaatgccattttcagctcttaaacacattcttttcttgcagcatgacatatgggcttcctaaacacaggtaaaaaaagctccaataggaagacagcttttctcagaaccagaagagtatttttaaacatctttaacgaaaatctaagttaccttttttttctacagtcatatcatatatacacattataattagaaacacacatgctcagacacatccatgtatctatctaaatagatttttttgtcttttaagtcatcaatagcggttgttaacatgatctaataaaatgcctaggctatatttcaatgtgaaattgttaaaagttacaacattaataaaaagttgctctcattcacttatgaaggttagaatggtttctgagtatgagaatgacaacacttatgtgaacacatttaatggcctctctaaaacagagagggtgctcaaaaatgccctctcatatttcccacctgcccagataggcccatgtgatggttgcctccatcaggaaggatggagagcttctggaaacccctaccccaccccacatgctgtgggtccctggggaatgcacttgcatttcctagatttcagagaagtgaagaatgaatgaaatcaggatgaagcaaaatgaatttctcaaaataacccacagtgtcataacaatgtatgtactagggaattgagaaaaccttcggctaggtataaaaatggggattttttaactgaaaaagaatttttgaactctttaaatatcctatgattcagtctatttttctcccccaagaaatcaaagcagtataatctttcattaactggttgattatcactcatgcatcattgaacaccaacactatttcaaacaagatctggttaaattgcaaatgagaataaatctggtgataaatggatatcatatttaatatttaaatgtctctggtatttacacatctctggtagttttgttcttagtcaattgtttaagtgaatgttgagaagaaatgaaagaaagatgtttgctcctctttgaaaacaattacggtttccttgcaggaatatgcttatctttcacatttcatcagaaacataagaagtctggctagaggcaatgacactgatgggaagagctctatgatggggaaagactgcttgggaaatgcagccttctactatatacactaaaattatcaataacgttgcaaaaagagaattcaattccataaactaatattgatgcacaaatgagcaaaaatcaacaattggcaataaatgacatcttaaatctgcatttgaagattttacaatagtcaaaaataaacataaaaatttgctttcatattttctaaaatgagtatcagagacactgcatcctctcaaatgacagctattgggacaaccatctctaaggctacatcttacgtttcatatttatatgccagtgaatattcaagttaaaaaggacacttcaaaaaagataacaagtccatgttttgtcctaaattgaattgtcggtcacctgaacattcaatcccacatgtagttggctctatggactcttgataaaaatgtaagttggtttgaattagaaactaccttttcaaggaggtactgtgcatgctacaaggtgaagcacatgacactcacacgaggtacacacaccatacactcaggttgtgtactggtaaacactgaaacatccctgttcacaggagattggccaggccaactgcatgaaagacactgcccattctcagactcagatcctcctgccaacaaggtaagcctgtgaatgatagatgagtgtacacatatgcgtacttgtatttcccttctctttactgcctgccttcatttctgtttacaagacctgccccaaccacttgaccttgaccatcatttcacggctgcaccttgccctttggaccaagcccatgacatctgccttgtgtttagaagctcattgccatcccagcctcttcccccagcgatctcaggcacagcctctcaaaaccccttacccacattcattcccactcaaatactctacaatttgtaattttcccaccttcaacctttaagccttctctatcttcaaaacggctaaaatcctgccagatatgaaagaagccatgacatcttctcctccacccttctttgtgtgtggactcaacagtgccctcctggatccctcatccaggaggttgagggattaagaggccccgccatccatcctgagatagtgcagaccttgttgataaacgtctctatattcccggaggccagttgcttccctatccctacctattaccgctggggtccacacgatctttgttgggaccatggagagaacacaaaggtaacaatacttttccccaggcctcagagcctcgatttgtgtgaactaaggggagaagaaagtagagggcagagaaagtccccctgtcctccaacaccttcttggaatcagacacaagtgtgttggtgatgctccaccattgaccaagatcccagaaccatcactacattgatatattttcacactgaaaggcaatgattccaacatgaaaatatctattcccttatgggtttgataaagactttctacatataaatagcacttatttacgaactgctttacatgcattaactcttgcacgtccacttatctatccaatgagatgtgttctcttatgatccctgttgtacaattggagaaactaaggctggaagagatggagttagtacatcgcagagctgggatacaaagccagacagtctggccctcagaacctgtgctcttgactttctccccaaatggtagtgaactctgcaataaggaacatagataagatgcacagaaagtttggtgacaatgtgcggacacaaatgtggaacacatagttttatttattacttggtagacaattctttgtaattcagtgggttctcggattttcttggattgaaacagaaatttctcccttgaacactgagttgataatagctcagttcacttccttgcatttctttaggggtgctattttaatgtcgggagagatatcaagcagcagaagagattctatattaaaatgatattttctatttggctacgaaatgaaagaaatatagatacggacaagagctaagtgaggaggcctggtggcaacaaaatgtcccaaacccatgcagccctccacaaagacctcattgtgtcaggctgtaacaaatgaacccaaagtcattctctaatgtttagagacctctttcaagaacagcaatatagatctttaaccaatccaaaagttaatttgccatttatgttgtttatacttcagcaattatttaacattttttaaaatttttattttaagttcaggggtacaagtgcacatttattatgcaggtaaacttgtgtcacgggggtttgttgtacaaattatttcattatccaggtattaagcctagtacccgttagttacttttcctgattctctccctcctcccaccatccaccctccaaaaggctccagtgtgtcttgttactctctctgtgtccatgcgttctcctcatatagttcccacttgtaagtgagaacatgtagtatttgttttctgtccctccgttagtttgctaaggataatggtctccagctccatccatgtccctgcaaaggacatgatctcattctgctttatagctgcatagtatttcatgatatatgtaccacattttctttagtagtttcttaggctctaggaggaaaaaaaaatcatttaaggatcaaagactgatgctgggataaaatgtgtcatggttgactctggcccattctgaagccacattcctgagaattcagcactaaagcatttggaaggcttcgagcttttccagaagacaggtgcatcctgtgagaatcacagcacaatgactcagcctcccagctgccaccttcctgaagatagaacagggcaggcatcttatggcatgttaaccaactctttggaaaagggtcatttttgtggcctgtcacaagactgaggctgataggaaatgctactttaccaatagtagacaacatttggggtaaattgttttctaaaggcctagcagctgtctcaagttcttcccatgatatttctcagaatttgaaatgtgatgactctgtcttaagatcatacaggtattttgaggtctgtagctacagagtaccacccctttcccccactgctacccttactggtacacctgggaggatacctgctcttctatttggtttttcaaagtaataagcaacattttagaatacatttagatttatagaaaagttgagataataacacaggaagtccccatatacttcacatctccacatccagttcctccattatttacaccttacattagtgtggcacgtttgttacaattattgaatgactattaatgcattgttaactaagtgcatacattgttcagatgaccctacctgctacctaatgtccctggtttgtttcaagatcccatccaggatcccattctacattctgccatcatgtcttcttaagctcctctgtagcagtttctcagactttctgtgttcttgatgactgtcagtcttgaggaatgctggtcaggaattatgtagaatacctctcagttggggcttgtctgttgtttttctcatttttaggctgaggttatgagagttttgaaggggcaaactacggaggtaaagtaccattctcatcacatcatatcaagggtaaatgctatcaacagggcttatcagtgtcgctgttgaccttggccacctggctaaggtggtgcctgccaggtttctccactggaaagcttctctttccatgtcgtcctttctggaaggaagtcgctctgcaaagcccacacataaggagtgagagttatgcttcatcttcttgaggtggtatatctacataaattacttggaattctttcgtcaggaaaatttggctattgttaccatttattcaatcatttatatcagtgtgggcttattttacacttatcacttattttacactgatacacttatcagggtgtatttattttaaactttgggttataatccaataccgccttatttgttctgttgctcaaatgattccagatttaaccactgggaactccttcaggtggctcccacatcctattgatgtatcaccatcattgcttgtttattttatcctttctttccccctccacctcttttcttttttttttttttcttggtacttctttattttctaactctacaagaagttccaagtgcttggaagttccaagttcttttatattcccttaccagtcttagaattagcgttctcaaaggagtcctggttcattttattggaaaatcctattagaaaccaagatttggggacagttgtgtttattgctactgtggcattgttccttgcttccaggttctcttagctgacagaaaaaaaaatgtgtgtatactaacacatgtatatacacacatctatgaatattcctgtatgtatccattgtatctctattcagctaaacatgagttcgtactgatgtctctaagtctaatcaggtaccacacagctcattctagcctcttccctagcttgtttgtaaactcccacttcatggtgagaaacccaactcccatgatctgccacccagggccctaattgtttaattacagtttagatgtatagtagtttcagaagtaagtccctgttagaaacaactttgtcaaccagagtgcaatgtttaggtatagttctttttgcctttagtcatacagcttccattcatctccaaagttacttaggtcagcatccaattagtaaagttatttaactcatttgtaatacaattagattgatttgcacagtctccatttcatcctggggtcccatgacctcttaaatgctttttttgaaaattttaattacattttaattcacctacattaagattcattctttttgctggaaggctctgtggttttgacaaatacatggtgttacatattcatggttgcattatcatacataatatcctcaactccctaaaaatgtcctgcatgcttcacctgttcagtcctctcctttccccaaatccctaacaaccactgatctgcttctgaactctattgttttgcctttttcagaatgtcataaaaatggagtcatagagtatccagccttcttagactggcttctttcccttaatatgcacttaattttagtggtttgactcatcattctactttatagctgaataatattctactgtcgagagatgtaccaaacaaaagtttgtatttattcatcagttgaagcacagcttgattggttccaaatttttggcaattacgaacaaagctgttataaacattgatatgcagatttttatgtggacatacatttttacatcagttgggcaaacacccaggtgtacaattgctggatcctaagacaacactgtatttagttttgtaagaaactgtcgagctggctctatacttctgcatgcccaccagcaatgaatgagagttgctattacttaatatccttgtcagcaattgatactatcagatctttggattttaactattctaatagatgcacagtactatttcaaggtcattttaacttgcatattcctaatgataaataatagcgagcatctttttctatacttgtcatcatatgttcataagaaataatggtacaaagttttcttttcttgcaatgtttttatttctcatattagaataatgctagactaatggaatgggtgaagaagtgttctatctgcttttgttttctgtaagactgtggagcattggtattagttcttctttaaatgtttgttagaattaccagtgaagcaatctgaacattgtgctctgtttttgtttttgaaaggtttaaaattatttattcaattattttaatagaaatcggactattcagtttatcagtttctctttgcttaacttctggaattggccaattttatctgaataatcaaatctgtgagcactgaccttttaaagtcgatgggaccagtcatagtggcccctcttttatttctttctctagttttctcaggtgtagacttaggtttttgatctgagatctttcttctttttgaatatatggatttattgctatacattttactctaaacactgcttttgctgcaaaccacacattttaataagtatttttatttttacttagttaaaaatattgttcaatttttcttgagacttctgctctgactcatgggataactgaagagtgtgttgtgttaattcccagatattagaggattttacagctatctttctgctattggctggcagtttgatttttttgtggtcataagttgtgagggttggggagtgttccatacttatgattaaatctcagtgttttttgggcctgtgtttcagggccgtgtccttccaagtgtctgcctctcttccaggtacacagatgtccccacaacccccacccggcatccctgctctgttctctggctgcagcatgcccaatccatttctctgaagccttgactctcgattatgcttttttttttttttcacaacttagatcatataggtaggctggagagggctggagtgggaaggaatttatttcttgcaggtgagacaaaatttcagaatgtggttctggaagaggttttttttttttttttttaaattttccgtggagagtagacctttgttatggagaaggtttgatcttcactgtgagaatctggtaaggttcctagagagaaagtctgtgaaagtgtgaggacgaccccaagacggtggcctttaggagctcctcactctcactccagtccacactcagccaccaacactgtaccaaaattgccatttgcttgttcttgctacttcactggcccagcagcttctgttccaggtaagccaatctctgttgttgtatctcgctgtgacacctatctccctagatttccgggtgagagtttatctctgtcaattcagttctctgtaagaaaacttgttgattttcagtttttccaggcttttcttttatttcttttttttttagacagtgtcttgctttgttgctcaggctggaatacagtggcatgatcacggctcactgtagcctctacctcctgcactcaagtgatcctcccacgtcagcctcccaagtagctggggttacaggagcacacgaccatgcccagctgactgttctattttttgtagagacaaggtcttgtcatgtttcccaggctggtctggaactcctgggctcaagtgatcctcctgtcttggcctcccaaagtgctgggattacaggagtgagccacccagcctggcctccagctttttcttgttgtaaagatgagaatgatggcctacaagctcttcatgtgtcagagctgaaattaaaagttaatgcctcctcttttgtgatcaaatattttatttaccaatctgatatatatttgagcagcacaatgagaaactggtctggacaccacccttggcattttaggtgattaatatttatcttacattctaggaatcatctaaatgttcccatatatctacttgaaaaatatcattgtttaccccacaatgaatatagtaattttttttggattttataaacagtgcatgtttacagaatggaattccactacttctgcattggcagacctagaactgtaactacaggcagatgacgtcactcattatgcactaagattgaattctatttctagttgcagccctgaagacaggagaaacaagagaaaaattcaaatatgaagaagccaaaaatggacttgttgagttaaatcaagaggcttagccacctgttatgggatggctggcttttgtgagttgccataagagacagataataaatgtatgaatctacggagcatggggtatgatagacccataggaaaagctttgatacagccctttgatacaccttagaacagacagggattgaattttacaaacaagatgctagtcagtgtctctacaagggacttctctggttattaagaaacctcagtccactaggaaaatatccctaaaggtgcccggaaagctactgcccaagctgtttgacatttcatgttttctcagtagataagtgtcttctacctccagaaagagttagaattccatacagagatgttttagagaagaagccccaagcattactatttttatggtaagaaatctgtgcagtttagctgtaatttttatgagatatagcatattagtatttatcatatttgtaattctaatttaaatatataattaagtaatcaatttagacaggtgatactaagcaggacttttactgagattaaacctagtagggtgatatttaaggagtcataataatactaagttattcatgttgtttatttatttataagttattaagatgcccagaacagttctgttagataattggagtatttaaaaaggaaattaaatatgtataatttataaatgtagtttaatatataaagaagaaaatgaactatgtttataaatgggtctaaacattaatcaaaaatctcttcacgtgagataacggagaggatcagaaaaaacacctattgggtattatgcttattatctgggtgatgaagtaatctgtacaccaaacccccgtgacgacagtttacctgtataacaaacctgcacatgtactcccgaacctaaaagttttttttaaaatcccttaagagtacttgtttaaatttacgagatacatacatagaataacaaaatttataagttgaactgaaaaagagggtttttacatttataactttaataaatgaccatattaaagtccaagtaatattttaaatatatttttttcttcactcaaaagcatctgcaggctccaaaaaactcacctaaacaaatatacttaaatctgatgaagaaaataaaggtcactaaaaattcaaccaaccagtctgaggcaattttggtcaaatttctactgaccatgcttcaatatgttcttatgtatgatacacacacacacaacacgtaatattgcacaagtggaaacacattacgtatgctgttgatataattagagactttttgcccctatgtccacctttctgtccttctcctccacatggacacactccctcatgctcatccctgccctctagtctttattaataacctggtgtatgccctttcatatttttctctgcaatcatacacacgcatgtacacacatacgcaattttttggttatagttcatttgacagaacggtatctactacacacaactcggcatttactttcccaagcagcaataactcatagcaattccacatgacctggtatcactccaattcacttctttttcatggctcagtaatagttcttgcatgttaagatggctccaggctgtatcaacatctgacagcctcaggtaaggtctgcacactccttcctgcctcgctttggctgttgaatgactcagttcattcagccagtctgtgcaaatctcagttcccaggctaatgatgcctgcagtccttcttaaccagaaggcccatgctgggaatgtacaacagctcttgtcacagagtgaacctgaagagctggctagcacggaacatggctgcattctcagaatattatatcggtcttaaaacagtgatttggttttcactttactcttgaggcatggaattactttttggacaacatggtgcctgggtcaaggtaaatttgagtaattctactaagaccatccaagttgtgaagatctacatagcgcagaagtcaactcgtctctggtacagaacagttctgcaactttggacaagtagtttaacatctctgagccacacagttgctttgcctgtaaaatggaaatcatggtcatgtccacttcagaggctgatgcaaggataaatgagattacataagcaaagcagttcccactgggcctggcacttgtaagaaaagatcattgtaagctattacgtgcttttccatacttggtaatgttgagtcaagatgtggctggttcttgaacttttgggaaataaggaatatgaaaattctgtgaccattctaactcctgtctattgtagcctcagcattctgtttcctgcttctcctctctgtctttgcctattctatgatgttcttgatccagttctctcttctctcacttttctgcagtcacatggtctctgtcattccttcctggtacatttaaatgcatccagttgccaattctttgggtggatatgtttctttttttctttttttgctgatagaacttcatgtaccctgaatgattcccctgggttgtttttcctaaaaatataatgtgagtaaaatatgtatccccgaagcccagggtagaggcaggtcacaggaggcttcttggtctccgtctagctccagatcttcgtaagcatatcagggcattatgacttagttgccctatgtctgcaatgatagcagaccttgttaataaaaatcactatcactatcagctcttcctcgtttgtatgaaactagcctcttcagaaatgcaatagtattaggagtaatttatttgcctgtgtaattaaagaatctactacactacatgcaagaaacaaaaattagcagagcaaatgtttatattattctatgaaaatagtgatacattacaatggagttatccaccttcagccctactgaggcattgggatatggtcagggggccagatggtgaccataaaatacaaagatgagactcaaaacagacagtggtttcatatcagttaaccgtatggtccagagtaaccatctgtactagcctctacaagaaacacattttgccttatgaagtaggaaaacacaagagaggaagctgtcaggttttcaaaatatggaggcatttattttctttcgctgtatgtttaatttgaagaatgttacataaaggccgataattaagactaagagagctgctacttcggtctgtgtagggctctttctgagctctttaatcaccctgtcccccttcagcaagagagctcagctgaaataatggaaaacagaatttagttctcaaggaccattcggaagaaagaaaatggcaccacacccatgagggccaaacactgccttccattcaaaatgtatcttctccaccccttaggatcacctgattcgacacttcttcaactgtattcatctgcaagcaaatttggcctcactcccaaggacattgcagctaggaagttaatgatgatgcatcaccaggcttgcattccttttcagaaaaaaaaaaaaatcaggtccctttacactgcaccaacagccatcatcattactgagagagctccgtcacattagatgcaataaacgtatgtttgtatcatcaacgggactaagaaaaaaagctcactgttgcatggataatttttctattattcaaaagtaaggttgttttgctaaaacaaaagttgccaaagccccaggtgatgaagtacaatgtggctgtattatcaagtaccatatcgagggtggaaacactgtgggttggaaataaatttcctctgtacacttgcttccatctgcacacttaaatatataaacttgtttctgccgatgcagctgcatgtattaaagaagaattctaaaccttgaacttagctgcccatgtttcttgcctgcattctagaaactgctttctgtgtataggtagcaggttgccttgctttgtatgatatgccaagcactgagcccagggtgtggcccaaagaggaaacttaatcaacatttgattaatgaataagtcaaaatatgcttctcaaagtgcccactctgaagagcatcggagctctggctcacgctcaccgtgttgtaaggtcaccatagcccagggcttctggctcttctctatctggtgggtctccgtggatgtgggctagtttatccttccaaaatctgtacagaacttccagttctgtagggtgttacttccagggtacaaatacatggggtaaggagctagatctcaggtgctgtagtcaaaggaaagaaacacccagccctcagacacagagcacatgacgggttttgagtgacaccaggggtcaggctgcccagactcacaacctggctctgcttcatagaagcctggggtcaactgagccctaggcattagttccctcatctttaaaatgaggttaataatagtactgaaatcattgtggaggaataattattaaatgagttaatatggataaacagcttgggaccatgactgatctacagtaagcagtcagtgtctacctaattacactcagataaccgaaacaaagatgtttcatcttactagtgtctgagaggaggctgccaatgtcaccaggcaaggcacatgaggagaacagtgcgagaagccatggacagctttattacttctgacaatgactgaacaactgtcttccaactctcccgtcaactcctgaaaggtaggtgtctagtgcccatcacacatcccagcgctagctcttcaacaattctgtggagactgttcagtccaggtttgctgaacaaacactgcaacaaagctaggaggttgtagacatttcctgtggctgctggaataagttctcactcttgaaataatgcacatttattctcttacagttttggagatgagaagtctgaactcaagggtgtcagcagggctgtattccttctggaggcactaaagaagtttattattattattatactttaagttctggggtacatgtggagaacatgcaggtttgttacataggtatatacatgccatggtggtttgctgcacccatcaacctgtcatctacattaggtatatctcctaatgctatccctcccctaggcccccaccctctgacaggccctggtgtgtgatgttcccctccctgtgtccatgtgttctcattgttcagctcccactgatgagtgagaacacgtggtgtttggttttctgttcttgtgttagtttgctgagaatgatggtttccagcttcatccatgtccctgcaaaggatataaactcatccttttttatggctgcatagtattccatggtgtatatgtgccacattttctttatcaagtctattactgatgggcatttgggttggttccaagtctttgctattgtgaacagtgctgcaataaacatacatgtgcatgtgtctttatagtagaataacttataatcctttgggtatgtacctagtaatgggattgctgggtcaaatggtatttctggttctagatccttgaggaatagccacactgtcttccaagtctcttaagggctgcctaaattccttggttcatggcctcttgcctctctgttatgaagatcctggtgatgacactgggcctgcctggctaatccagggtcatctctccatctcaagatctttcccttaatcacatctgcaaaggcattttgtcatgtaaagtaatacattcacagattccgtgggttgggctacagacatcctggggagggggtgtatagttttctgtctaccaaagagcttgtggaagattgggagaaaaattgaatcagatatggggatatgtgggaggaaatgaaggaaagatggccctccctggggtagaatctgaggattttttaaaccataatactccaaagaatcaactgggtgcctccaggaatagaaatataagactccagcccccaagtctgattctgtggtctggaaagtggaatgggaatctgcattcttagttagctctctcatctccagtgaaaacgacccttggacatatttggacaagcatactcaggatgtggcactccaggtggaggaactgaaaatgggccagactttggctcatgagaatctcctctttacacaataatccacagccaaaggctctgtgttttaaaaccagggaggtggtagagctggatagcttttggggacatctgggcctaacagcgagtaggagaggggatagaggtgttcaccgctaaactccacctagcaggtatgttggcctaggtgtcctctcagaaggaggaagacagagacaaccaagcgctctgagtggaaagcattgcgtcttctctcacatgtgccatagcagctgggggaaaagaaaatgactaatttgtgtgttgcctaaataagcaacaccatccagaagcatctctttccttttccatgcctaaaccatgtctaagtaccggcttgacatggccttaaatgacatgcaactattctttttggtgacagctcccagaggtgacagtgcagtactcgggaggaattaaaagactttccgtaattttctagaatcctaccactttcaggtgagaatgactgtgcccttctcatctgaatctgacagtgatataagtccccatataaggtgatgatcctgcttctctttgcttgagaggcagcgtcaatgccactctgaaaaaaagtagattctaatttgagcatcatgtgtatcattcaccgtctaacttatgatcttttaaactttccctaggaatggcttcagagatggagaacagttatgtgtccagagtggaatcaggccattatgatggattaccatcatttctccctatctctagaaagtctgctccaaaggtcttttctgcagagaagaatgcacagcgtttcaggatgtcaaaaccttaaatacccggatacttaaagatgaatcgggccctagcaaagaacaggaaaattagtttttccttttttttcaaagtgagaagaaataatgatagtacatgctggaaatataattttgatatcacaagtttcttaggaaaaggaaataataacctataacaacattgctttagatcacaagatagagaagtaggcctgttttgtatatgctatttttggatacctgccttcttaaatttgagttaatcactttactgtgcaagaagaaatcaaaaaaagcaacgatgaaagaagaggctccttctaagttttcaagagataaagaaagtaattttataagagaggaaataaaatgtaatgctttttccagcataaggtgaatgagatcatctgggttaggaagtttttctatgctgggaagatatgataaagtaattgaacataagtgcctagaattttataggaaacttccaaagtcacttgatttagaaggacagatgaggctcaatatggcttcttccctcagaagtggcataggttacagcagtagaaacttaatccagcctcagaaagagttcccaaagcactcaaaagttgtatgcaaaagacttagaaaaccgggctggaaatattttatacagtaaccctgaatgctttaggatggttactttttaatgtattccatgcttgtctaacacctgcccattccagggggtacatacgcaggggcctctccaggcgagcatctcagttatacttccatcaggtcctggcaggaacactggatagggaggctagattcactgcacatcgcctctaccatagctgctcagaccttcatgtgcacacaaaacacccagagatcttgttggaacacaaattgccagggtacaacccaggggaatttgcatttctcacaagatctgcccctgggccccctgcaatgcagatgcggtgggtccccagaccccactttgggcagcaccgatctatacaaccacaggaggaagccctcccgattaacattcaagccaggcaggtgaaggctggccacatctacctgcctgtcccacagggacctccacctttcctttctattcccattctacctttgttcagtaggccttcatcccctcttatctagctactgcagtagcttcctcactggttttttttttttttttttttttttgcctccttttctattctaactctacccattctaatgtatcttgcatacagatagatagatattcattacttttctgcaaatacatcttggattacactttgtctgcctttaatagcattctgtgtcttccacaagatgacagtgaattacatgtgagccttttctacctaaattaccttatattttccagccttcacgtttttgttcaggctgttcccaatgtcagaaatttcttccccattcccgtcctttcctctgcttactgaaactgcatagtttttactacatagctccaatgccccctcctttgtgcagtatccattgattgccctgtgtgaaaatattggattcctcctctacattccaataacaaattgcctgacaggcatgcatgccatttgtgacgagtgccactgatccccttgtaacaggtatttgtagcttccccaccatatctaagcttcttgggtgcagagatcctgatgattctatcaagatctatcacatcttacccacagaaaatgactaatggtaatggtgctgggagaactggctaaccgtacgcagaagattgaaactggaccccttccttacaccacacgcaaaaatcaactccagatggattaaagatttaaatgtaaaacccaaaactgtaaaagccctggaagacaacctaggcaataccatcctggacctaggaacaggcaaatatttcatgacaaagactctaaaagcaatcacaacaaaagcaaaaattgacaagtaggatctaattaaactgaagagcttcagcacagcaaaagaaactatcaacagagtaaagagacaacctacagaatgtgagaaaatatttgaaaactatgcaactgacaaaggtctaatatttagtatctataggaatgtaaacaaatttacaagggaaaaacaaacaaccccattaaaaattgggcaaaggatatgaacagatgcttttcaaaagaagacaaacatgtagccaacaaatatatgaaaaaagctcaatatcaccaatcactagagaaatgcaaatcaagacgacaatgatataccatctcataccagtcagaatagctattattaaaaagtctaaaaaaaataacaggtgccggtaaggttgcagagaaaactgaacattcatacactgttggtgggagtgtaaattagttcaatcattgtggaaagcaatatggtatggtgattcctcaaaaagctaaaaagcagaactaccattcaacccagcaatcccattactgggtatgtatccagaggaatataaatcattctaccataaagacacatgcaagcaaatgttcactgaagcactattaagaatagaaaagatgtggaatccacctaaatgcccatcaatgacagattgaataaagaaactgccgtatatatacaccatggaataccatgcggccataaaaaagaatgagatcacgtcttttgtagggacatcgatggagttgaaggccattatctttagcaaactaatgcaagaacagaaaaccacatgccacatgttatcacttataagtgggagctaaatgatgagaacttataaacacaaagaaggaaacaacagacactgggttctacttgagtggggagggtgggaggagggaaaggagcagaaaagacaaccattgggtactgagcttaatacctgggtgataaaataatctgtacaacaaaccccagtgatatgtgtttacctatggaagaaacctgcatgtgtacccctgaacctaaaagttttttttttttttttaaaagaaagaaaatgactttgttagatggactcctgaaggaatgaatgaacaaatggatgaacggtcaaaataatcaagtaaataaagtaatgttttaggctctgtggtgatcgtgagtgctgtctgtcacatgtttccgctcatctaccttctgagcacctgggaaacttgttctgcctggtcccttgtggttggatggggccatatgactggctttagccaatgagctgtgagtagaagtgccatgtgtatcttccaaccaatgagctgtcagcagaagtgccatatgtgtcttctgacccaggaaatgtgagcagaagtaccatgtggtaccatgtgtgtcttccagccaatgagctgtgagcagaagtactacatgagcttccagcaaataagctgtgagcataagcaccatgtgtagccttcagtgaatgagttgtgagcagaagtgccatgtgtggcttccaggctggaagccttgttatgatggcaccatccaggccactcttattgacactgtgacatgcaactttgaaatggtgcttgttttgtcagtctgggatcctgagcccacaataagcagatccccctgcccccaaccccacagtgggcatattgtgtgagtgataaacaactctttgtttaagcagctaagaagcaggttgctgcgtactgagcagaaccctctatcctcactggcacaggacttttctggatctgtttcccaccactcatttccacctcacgtacagctcttccagccacgaccaggtccttctctcaacaacttctgtccttgaaggtgaccccttattacccattttattctagtaacataagactcccctgtgtctggggctttgcttcctgttttctatttacagctaatgatatctgagtctcccacctcacagctgagtgatctggtctgtgctttgggaccacccctgggattctgttacagtgaatgttctcatgtatttagactgactttggaacatgaaagctcaggagaagaggtctccctgcaatactcctgttacattttgcaatttagaattaaagcagatgtacaatcataaagaaaaaggaaaaaaataataaagtgatttttttaaaaataaaatttcagtctttgtgggaggggatggattgagcatttccttgattggattgttttgctttggtaaaaaagcacagactgtcttcttaaatgcatttctttttctttttcaatagtgaaaggtagtgaaaaaaggaaagaaatgagcacttttaacaagaatattttcacacatattacctgtacaggagacataatcagtgcaaaatggaaatgtgaagcttctcattcaaaaactaagatttgcaagatgatgacagcagtaaataaataaaagcatcggttttttctgagtgtggggccctgtgtgactgcaccgtttgctcccccataaagccagccctgcctgtgacatggcagccttctaaaatcctagattttttgctcctccacacattgtttcagcactgtattccatgacttcagagaatgcccaggtgtgattgctgaattcggtgagcatttctggaggagaaaaggataatgcaaagaaagaggaatggaacacccttgccagcagccaccattgcttgtcatcacattaatttcccccagtgtcatggagacggtctaccggggcagtgatccacacaggcatcagagggagggacctctgacggtgacggggtcatttcccatctgtgatgttcatttcagtcctgtcaaccccagaaagcacagctaaagacaagtggaaaataaatgcaccttgatgcccaaatgggttgttccttccccatttagacaacacaaggaggagaccatttttaaactggtctactgccatgtggaaatggaccattctgtcacggtgaactaatatcttatgacttttatcatactgattggagccaaactgttattaaaattcacaattgtgaccgggaagagtggttcacgcctgtaatcccaacactttgggaggccaaggcgggtggatcacttgaggtcaggagttcgagaccagactggccaacatggagaaaccccatctctactaaaaatacaaaaattagctgggcatggtggtggacacctataatcccaactacttgggaggctgaggcaggagaatcgcttgaacccaggagaaggaggtttcagtgagcccagattgtgccactgcactccagcctgggtgacagaatgagactccgtctccggaaaaaaaaaaaaaaaaaaagtcacaattgtgcagcagtagactactctccatttaatcaatcattttcttaagtccctgtgcctggtttgcattttgttttctgtgatgcagatctaagaggtctgagatgaatcctgaagggatggggcgcacgaggaaagctgctgaaggtgttctggaccaaagctaagtagcaccttctgcttcatggtccctcacagcagtggtaggtaggtagttaggagctctgctcaggttggggcggcgagggtgggaaacgtgagccagaaaagccccagaagtaatctgatgtgcagtttgtaacagacctcattttcctccagaagccagggggtgggatgggtgaaagaggagttttaaaaagcaagaaagctcagtgctgttatgatttgcatgcagaagtacttgaaaatctgtactggcaattagctaatgagacagtgctcatttccgccgactgccaagggcttgacttcctagagagctgagcgaggcactgggaatctacaggaagaaaatcgagggagggagggagggatgctcctgcttcccccagtcaccttgaaccccttccttacatgtggcaaccatgttgttccaatgccagcccaagtgtcacagaatagctgtgagagaaaataaacaaagaatcactccagtaactttcagcacaatttattggcacttgtgtcttacggctgctgccgcctgttggggtaatgacacatgatgggtgattaaggtgcaagtccttaaatcaaagctgtgcatttggtctggagaggcagccagcagccctgagtttgctcatccctctgagtgggaggacctctttaggacaaaaaggggcctgttatcctaacaagggcaagtcctcgtgtctgggaactgtttcatgttttcaggatttaccctagctcctctctgacacatgagaaaaaaggaaagctgagagggtagcccagtccatcatagcttgctgggtgatttcgcatgaggttcccggggctgggatggcttctgaagatgcctccacctgcacctctccctgaagggaggcctatcaagcagcaagtcaggggaattttgcaagtgttttgatgacatgaatctctgcttttcaccctttcagggttggtgctggcagggaggctcgcttaggtgggtggagctcatagtctctctttttcctttatgccaggaattaacaaatgaggaagagattgtgtgtgagcctccctgagccatggacattacacctctggtctgccatgggcttttgtgcttttcattattctgaaactggacaaatcaatgacgctttcatacttatctagccaggaggaggaacggggatggtagattgctgataagatccaggttcctgttccttaaaaactaggagctccacagcaatggatcagaaggggccaagcttacctaagctggcaggatagggaagtcccttctgttttagccctttaaggacagtcacttttaaactacccatcagatttttgttctctgtatctgctttcctcaggccttttctctctataaaccccacctcctctgctcagctcatgggaacactcattctatggcatcaaatgaggtgttgcctgaatctagactctcaaataaaagccaaaggagattttaaaaaacatcctcaagaagcctgttcagagagcctgagtgaacatgggcaagaatcccatactcacttcctatacgtccagaaagaagcagaaaagaggctctggcatggtggctcacacctgtaatcccagcactttgggaagccaaggcaggtgaatcaaatgaggtcaaaagttcaagaccagcctggccaacatgatgaaacccagtccgtactaaaaaaaaaaaaaaaaaaaaaaaaaaaaaaaaaaaaattagctaggtgtggtggtgcatgcctgtagtctcagctactcaagaggctgaggcaggagaactgttggaacctgggaggtggaggctgcactgagctgagatctcgccactgcactccagcctgggcaacagagagagactctatatcaaagaaaaaaaaaaagaggccccaggagagcaggatcttggggtgggtagatgtgcactactcatgactaacacggtgaagaagtatccaacagcaatgaaggtgaagtccatactactgtaaagaacagtgctagaaatcaggcagaagcccacagtggatagcctggagagggcccaagtttaaatctcagctttttaatttcctgctgtgtgaggagtccccaggatgcaggactttcaatgtggagactgagagagtcccagggaaactgagacagctggtcacctatatgtggccttgggtcaatctttaaccttgatgaatgtattagtccattttcacactgctgataaagacatacctgaggctgggaagaaaaagaggttgaattggatttatagctccatatggctggggaggtctcagcatcatggggcgcagggaaaggcacttcttacatggtggcagcaagagaaaaatgaagaggaagcaaaagcgcaaatccctgataaacccatcagatattgtgagatgtattcactatcatgagaatagcatgtgaaacgctgacccccatgatttaattacctccagctaagaccctcccacaacacatgggaattctgggagatacaattcaagttgagatttggtgggggggcacagccaaaccatatcattctacccttggcccctccaaaatctcatgtcctcacatttcaaaaacaatcatgccttcccaacagtcccccaaagtcttaactcatttcagtattaacccaaagttcacagtccaaagtctcatctgagacaaggcaagtcccttctgcctatgagcctgtgcaatcaaagcctagctacttcctagatacaatgggggtacaggcattggggaaatatagccattccaaatgggagaaattagccaaaacaaaggggctacaggccccatgaaagcccacaatccagcagggcagtcaaatcttaaagttccaaaatgatctcctttgactccatgtcttgcatccaggtcatgctgatgcaacagatgcattcccatggtcttgggcagttccacccctgaggctttccagggtacaaccttcattccagctgctttcatgggctggtgttgaatgtctgtgacttttgtaggcacatgatgcaaactgtcagtggatctaccattctggggtctggaggacagtagccctcttctcacagttccactaggtggtgccccagtagggactctgtgtggggcctctgaccccacatttccctttgacactgccctagcagagattctccatgaggaccatgcccctgcagcgaacttttgcctgggcatccaggcatttccatacatctcctgaaacctaggaggacattcccaaacctcaattcttgacttctgtgcacccacaggctcaacaccacatggaagctgccaaggcttggggcttgcaccctctgaagccatggcctgagctgtcccttcgccccttttagtcatggctggagtggctgggatgcagggcaccaactccctaggctgcacacagcatgggcaccctggtgttggcccatgaaaccattttttcctcctatgcctccaggtctgtgataagaacggctgctatgaagacctctgacatgccctggagacattttccccattatcctgggaattaacatttggctccttgttacttatgcaaatttctcctcagaagatggcattttcttttctatcacattgtcaggctgcaaattttccaaacttttatgctctgcttcccttataaaatgaaatgcctttaacagcacccaagtcatcttttgaatgctttgctgcttagaaatttcttccaccagataccctaaaccatctttctcaagttcaaagttccacaaatctctaggacaggggcaaaatgctgccagtctctttgctaaaatattataagtgtcacctttgctccagttcccaacaagttcctcatttccatctgagaccacctcagcctgacgttattgtccatatcactatcagcattttgggcaaagccattcaagtctctaggaagttccaaactttcccacatttttctgtattcttctgagccctccaaactgttccaacctctgccggttacccagttccaaagttgcttccatattttcaggtatcttttcagcagtgccccactctacaggtaccaatttactgtattagtctgtttccacactgctgatgaagacatacctgagactgggaagaaaaagaggttggattggacttacagttccacatggctgaggaggcctcagaatcacggcaggaggcgaaagccacttcttacatggtggcggcaagagaaaaatgaagatgaagtaaaagcagaaacccctgataaacccatcagatctcatgagacttattcaccatcacacgaatagcacaggaaagactgacccccatgattcaattatctcccactgggtccctcccacagcacatggaaattctaggagatacaattctagtagagatttggatgggggcacagccaaatcataccaatgaacatcagttttgtcatctgaagcagggcagatagttatgcaaattgcagtattgttggatattagctgatatggtttggctctgtgttcccacccaaatctcatcttgaattgtactcccataattcccatgtgttgtgggagggaccaggtaagagataatctgaatcataggggtagtttccccgatactgttctcatggtagtggataagtctcatgagatctgatggttttatcagaggtttctgcttttgcatccttctcattttctcttgccgctgccatgtaagaagtgccttttgcctcccaccatgattctgaggcctccacagccacgtggaactataagtccaactaaactttttttcttcccagtctcgggtatgtctttattagcagcatgaaaacaaaacgatacattagcgtagaaatatattcaaatcatgggaattgtgaagggtgaacaaacacgagtatgaaagcaacatttcagcaggtttgagaaagttgttcatgaaggcagctgtctctctggagtgtgtgatgtggcaggtctcagggtcagaagtgagctctctttgcaacctggtatgctgggagttaagctttaggaaacacagagttgaggtaatcatggcttcatggggaaaatgcaggggttccttgcagccagaagagaagagaacaacctccaagctccaaagaaggatgaaggagttaggtgtgtagccccagcccctaataaggaagaggcctcaaggtattttgtctgagatcaaggcctcctggcactattccaagtggaaggaaaccctaagctgacacacatctgagacctgggtggagccatttcaaaggaagctgaggtccttctcttgacttttaaccttgagaacatggtcactttgtactgtttttgcaggttctactcacattgaccttgactccatgaccttggaatttaaacatgagacaatgtcgtatccttgcctgggtttggcaattgcagggttcaggccagtagaatgacctatgacggtttggggattcacagcctctgtcgcaagcttaattcatgcagcatctggggaccccaacactcttcatgtggtctgcgacatctctgaaaaacttctacatggtaaggaattttggtgttttttaaaaaagtcaagggcctcaattagaaatatgaataaagggagatgaaggctacttcctttaaggttgtatcaagacaggaagacataaagtaagagtgtatatatgacactatgtggtaagctgcagataaaaatttcaatttagcttgatgcatcttctgtggttctttcataattttttaaaaaattccacacttaaacagttgtgatagatggcctgctaatacagtgcaaaatgtggccattttacattttctcacaaagaattaacccagaatgtctgaatccccagatggcttcactgttgcctcctttcatccccgtcactaatctgtgaaaaggcagccctcacattaagacactttcctgaagtggcagcgacagctcagtgagggctgctgtgctgcactgggtcggggctgacgttcccaacctcactgctaatgagaagacttgaaagattactgacatgttcatgttcatggaggtggccggaagtaattaagcactcttcaataaagggctaccttggcaagttcaagatttgaatgggaaaagggtgatggctgggctgggtgcacatgttacctgcatctccaagaccctgtccttcttggcgtctttccctgcttatcagaccagttctgggcactgataacaccacagagcatttgctcaatctctatcacctgatatcctgaaaagggagtggaggcctttttgcagacttctgggctcccacagcccttgtgctgcagcatgctgcctgccttctcttctgtcatcaatgaaatatggtggagggagctatgctgctgatgcagcttggaggctgtaagggaccagagtcaaatgggccatcgagggctggctacacagttactgggctggccatgtgatagagagtgcagaccactaaaaggcacatagcagaagaatactgagtaacacagaaaaaaatcaacacatatagatcagaataaaggctaagttattaaacagtacattcagatgtttctagttacagaaaaatgcttcagcacatattagcagagagaaaaaaaaataggccacaaggagatttatcactatattaatttttttttgtgagggagggtttttctcaccattcccgatgtttccttctacgtagatcagacctgttgaggtaacacttctcctatttcctagtcttcccttgttttaatttgggatagaaggaatgacttacacttgataatgagtttggaagtgggaactaggcatatacagctctaccctttcctgtactttttgttgggagctgacagttcctaagaaacaccctgtagtgggcagattccaagatagcccccagtgatcctgtcccctgatattcatgcccttgtggaatctcctattcttgagtgtaggtaggtcctgtgactttcttctaatcacttaaatatggcaaagatagtgggacatcatttccttgataagctcacatgatattataacttccatctttcaactctctctgttgccttctccacttgcatgttttcttttctttcttttttttaaaacaaaacaaaacaaacaaacgacacttgcaagcaagcagccatgttgcagacatcctcatggcaaggtaccaagggtgacctttacttggccaacagccaaagagtaagtgaggccacaagttgactcctgacaacaattacatgaacttggaagcagatccccacttgagccttcagatgagacctaagccatggctactactttgattgcagccttgaggaagacattgagaaagctgtttgtttcagatggttgaagccaggacctcagtaagctatgtctggactcctggacccacaaaaactgtaagaacataagtgtatgccattttaagctgcaaaatctgtgataattagttacaaagacatagataataaaatcagacctttatgccataaagtatgcatgggtggccctaatctttggtagggtacagaggtggtattggggtcctgtgatgcctaggactgtctgggtaagcctactggattcttagcttaagttatgaggagtatctgcccatagatataaacagcattgtctcacatgaattttatctttgacaaatgagattttgttgttttcctcctttgtttccctcataaatttcagatcttgagtaggaaaaagagaaatatttctatcaccatcttttgagtgttgggataaggagagatttttctacctttcaatctattattttatttttaaaatatatgggaacctgtgtaattgttataatcagaaaaaaaatactaagaagggccagccgggtggccaggtacatgcaagtgagttttgatagggactttttactattgccctagactttgtttctatgattcaagattgaggatcaaagtatcacatccttaaacttttttcaagactatgggaaccagattcccattaaaggcttaagttctgctactctcaatcattactccagtccccacaacttcccaacgtataaaacaaaattgggggaagtggggagaaagagaaaattgtcctgggttactagagagtgctaaggctcgagttgtctgtccccctagacccaagtaaggggcggggggctgagaacgtatcactcacagaggttgggagtgcctgtaaagtgggtaaatggaatttatattcttctgtttgctatttaattgggaagtgacatgtttatctgccttacacatacctgagcaggaagacataaaccaggagggagaagacaggtgaagtgtgagcacaggacgatgatgcctaagtttccatggacactacagaaactatctgggcttaggatggttggtccacagtgagggaattctgtagcacaagtctctgcaaggcattggggagcatcgtgggagggaggatgttatttacctctttatcattctcctaactctgttagggactgtatagcagggagcctggaaattccctgccaaataaattgcatgtatttgattacatgatacaatgcagaatatatctggtctttgttcctggttccgggacagagcttcaaaacctcttggagttttcagagtgatagaaatgtcttcagttactcacaacagaccctttctacttctgcagtacctgagtttatgctaatgaggtgacttatggtgggccctcagatgattatcaaggaggggctggccttctggaaagaccaaccatgtgatgagaggagggggacattcagcctcaccccctgacctctggggaaggaagaggggctagaaatagatctcagtcatgtggccaatgatttaatcaatcacgcctccgtaataaaacttagataaaaactctgagcaatgcaactcagacagcttcctggttggtgaatatatgggtacgcccggagggcggcacaacccagatccacaaggctggaagctcctgtgctcaggacccttccggatcttgccacatgtacctgtgcatctggctgttcactcatgtcctttttggtaaaatggtaattgttaagtatggcattttcctgaatgctgtaagaggttctagcagattatcaaacccaaggagggtgtgctatcttgaatttgcagctatccaggcagaagtgtgggaagcctgggaccccactcactgctggtgtctgacataagagcagtcttgttagggatcttgccctttaactcatgggatctgatacgaactccaggtaattagtgcctgaatcaaactaaattgtaggatacccagttggtgtcagacaatattgaaggctgttttccatacagagtgagggctttgatggtcagtaaatattagataaatagtcacagctaagataaatgacagagcctttgttttgcatgatctcctcatatcatatcaccccattacaatagaggcaagttaccctgaatgaaaagaccaaacactccaggcagggggagggtggaatatcacagtttaagttggactggctatgatgatataaggaaataagtaaaagctcagaacccggtggaaggtggtgatgggagcaaatttaaactgattcattatgctcccccattcctctaagcaagaaaggattttctgacgcatacaaaatgatacagttggcaatacgaatgcatctgatgcttatagtcatgagcttttccaaccattgaaaacagaggtctcacctccagaaaactgaggtacattatgacttaacacacagaatcaaggtgactggttcacgggggtgggtataaagcccaggcccccagccccagccaccttggaagggccacccagcttcagagctctttgcaggatcagctgggccctgcttgcatctgcatcccagcttctttctgtgcctctccaacttcctgtactccccctatggcgttgatcccaagcgctttccagcaggtttccagcacacagatccctgccagaagccagcctaagacaatcctcctttatccagctttccactcaaaaatcagcgtcctcagagtggctttcccttatctctcacgtgccatctagtaagtgccttcattatatttggtgcatgttttaactgtgagattattcatctgctgatatgattaatgtcaaattataagctccgtgtgggtaaaggccccctggtctaatcacaattgcatctctaaggcccagcactggcagttgtatagattagacttccaatatataattatggaataaacaggtaaataaaggatgttaaatcccattgaggagacgactccattttttaagtctcctactcagttttcctctatatccattcatccctttaaccattgagtacctgctgtgtatgttactgtgtgctgggtgttctgtgccagagagtggtgactcagacagctcccgctccgtttttgtggtgtgattcatgaagccgggttccgctctgcaaccccatgttatggtttgagataatgttacaaatgatctactacatgtatgtggctcttttccccagtgagtctataaaagacttaaaggcgaggacatttacagtccttgctcatagcaatacagtaggcagaataatggtgcttcaaagacctccccggcctaatctagggaacataaatatgttactgtacacagtgaaaggtattctgctgatggaatgaaggttgctaattaactgatcttaaaatagggagaagatcctaaattctctgggtgggtccagagacatcgcatgggactttaaatgcagaataagaaagcagaggagtcagtccatgccttgtggcagaaacagaagcaaaagaaacagaacagaaggagagtcagagatctgaagtgtcagaaggactcaccccacacttggctaattctgagatgtaagtgattatatgcaaggaatagaatgaggcttataggagctcaggacaacccctagctgacagctggcagggaagcagcgatgtctgtctcacagccacctggagcagaattctgcccacagtcagaaagagccaggaagaaaattctctcccaggtcctccagtaagaggagcacagtgctgcggacgctctgactttggctttgtgatatgtgaagcagagaaaccagccaagccactggatgcccaacctgcaaaactctggataataaaagggtattttccttaagtcactaagtttgtggtagtttgtaatggcaacttgagaaaactaatacagaaggtatccaatgtatgttttggacttgagtctttaaaactctgtattcccaaattaaaatgcagcataccctgaagcatttacagagtgaatttgcagtttcaactttttgtaaacagcatggaagttcacggcatgttaaaatatgcacacgttaatatgtgtcattttgctgagggaggtatttaggtatttaggctgtgggtgctacaaggcatgtgtgtgggaatataatccttcctgaacttttaggccactaatatcaaaatctgcattagtcagggcttcccagagaaacagaaccaataggagagagagagacagacagagagagagagagagagacagagagagagagagacacacacagacagacacacacacacaaagagacagagagatttatgataaggaaccactccatgaaattgtgtgggctagtaagtctaaaatttgccgggccagccagcaggctgtacccaggaaagaactgatgtgcagcttgggtccgaaggaggcagcatctcctctttcttccagggacttcagtctgtttttctaaggacctttaattgatgaagcccacccgcattatgaaggataatctactttactcaaaaatctatggatttaaatgttaatcacatctaagaaataccttcacagcgacatctaggctggcttttgaccaagcatctgagtaccatgcctagcaaaagtgacacatacaattaaccatcacaaatccacaccttgtcaactcggcatccatgcacgtctgcttacaccatacttactcttcaaataaagacaataacaaggttatacttccacttcacataatatcactaccctgagcacaactgaaagcacacaaaccctgtccctaaaagaaaagcaaagtcctttggtgatgttcatgcctctccttaatgtcccgtaactttactactatgatgtgaagttgacaatacttaaatactatgatagcaaatcaatgtatcatatgttatatgataatgggataagagaggaaagaaaacaaagatacaattgtttcttggtatctttggggaattggttccaggaacccctcatacaggatacaaaactctgagagagttcaagacttttcatatgcactggcctagtatttgcagctaacctacacacatcctcctgcacactttaggtgccatctagactacatatgaaacctaataaaatacaagtgctatccaaatagttgttgtattgtactgtgttatatttgtatttatgtttattgttgtatttttttgtttttttttccctgaatattttttatttgaggatggttgaatctatgagtgtggaagctgcagattcaaagggctggctgtatttgctgaacacacacacacacacacacacacacacaatggcaaacgcactccctggcactgcctctccacatggctatgctattctctcataatgcatcatccttagccttttacagtgattaccttgggagacaggactgaatgagcagaatggattcatttagcattactacaatcccaatttttacagttgtggaaataattttacagtggcacatgagaaagaggggcttctcagaggtcgcagaaaataaaagacaactcaggacttccaaacgttaatttttttaatgctcatgcacttacccttgtttttttctcctggcttcaatacatggccaaggtagcacagaggtggctccatggtgtgatgacaatgacaacactcatggtattatgtgcctgttaatgcagtttatggctacagaaagcccctttctccttattcttttcacagagcaatgtaccttccccttgctgcattatcaatggggttttaagcaaaagtgctcttttctcctcttgcacatttacaatcaatggctacagactcagaattgtgaagtgctttctgactgttttgtttccattttctagcaatggcccattctgtatcaatctaaatgagccacagaaaacatggcatctgacctgcatctccggggagaaagtattgttcctagcagcattcagcagtaccatatacaaaaaggagaagcgatgaaaacctaaaagcatgtcttccaaaacttcttcctggagatcttcttctatgtctggcatcagctctcctgctctttccctcttgcatttcttcctgctgcaaacactggttgagaacctactacttccaaggcctagaaatgttattctcaaatgacaggaacacatgaaattgtttccaagctgaatgtccaactaagataacagttgcaaaatgatgccaaaccataaagtgaaatatgagctactcctgaaatacaataaaatggagctatgtgtatttatctgtgtaaaaagtaaagtagaggttcctcttcaaagactttcctccccatctaaataggaataaacagtaacttctcttagaagcgaaatttattcaaagacctgtgctaacattcttaaatgtctgctagccgcaatgaagaaatcaaggtactttatgttcttagctcccacaatttagcttaaatatctgccctggcatgcttatactggtccaaacaagcattaggtcatagcctgttcctcttccttatttgaaggtgtttctacctttctcagcattccacaagttacttcctccttcttttgttctcctctctctttacctcttttaaaaagttctaagttgctagccaatcgagacaaacacagaatgtgaggtcccgttccagccaatggaaaccagacacagcagtagagtggacacctcaggttataaacgaccctgtctcctttgtttggtgtactcttggggcaaaactgctggcgggtgtaccccttctgcagaaagtaaaaatggcactgctgaggagattaaatttatgttgaagtgctatttctttatggcactgaggaacaagtatttctaacgtctggaaagacaactgtgatatattgtcaacttaaaaagcaaatgcatactaacatatactctgtgatttcattttcttaaaagagaaaacgcttacacatatgaatatgcctactaggaaaaaggaaaaatgaagagcctggccatccatccagagtgcaatgcaaagttctcacctccctcgaaggatctgatctcctctttaatgaactctttttttttttttaccccagcagtgtcatggaggaaacacaccaagcttcctcttgccatagggccttttctctggttataccatctccctggaatgcatatggcttccctccttctcattaagaataaagactccactctgagcaaatacagaagctaagtaataaggggcaagaagctagacagggacttcccagtatggagcagatcccacagcaccaaccagagatgagaattaggccacacctgtaaagaggcgatgcatctgggcccagaagttaaaagttacctccatttccttagaaagaaggctacaactggaatcagttgaatactggttactgaatagttcttagagagaatgaaagttttgagtcagccattcttttttttttttttttttttttttttttttgagatggagtctcgctctgtcgcccaggctggagtgcagtggcgaagtctcggctcactgtaagctctgcctcccaggttcacgctattctcctgcctcagcctcccgagtagctgggactacaggtgcccgccaccacacctgttataaatgaccctgtctcctttgttcggtgtactcttgtacagttacaagagtactagttttttgtatttttagtagagacgggatttcactgtgttagccaggatggtctcaatctcctgaccttgtgatccgcccgcctcggcctcccaaagtgctgggattacaggcgtgagccaccgcgcccagccgagtcagccattcttaactaacaatgcttatcctgtgtagtccttcaggttttattatacaacatactgatgattaaagtcacagttccagtgttcagaatgagctgaaaatcaggtgctcttttctgctcaagcatctttggaatgagaagatccttacttgcctgtgtatacatggactgtacacctctgtaatgtgtcttacaatcagtagccaaacggatagccacaaaaagtggacatctaacttgaggttctggaatcaattggcttaagggtgtggaaattgaaataaataggtgggaaaacagtatattcaaaagtctaccacctccagccctgtctctgccttcctgcctcagccacagctgaactgcaaagagcagatggtgggtcactgccctgtagcatggacacttgccatgacctgccattgctttacaaatgtgcatcagtgactctgctccgtagctgttgtctttggatatgtcctaacatgaggagtgaggatggtccctgcagagggtcacacctgggagtcctcaagagaaaagtgagcatcacaaccaggcacttgcattctacaaagaataaatcatcagagaaacatctccaagccttgcctgtccatcagcttatttccatgtacccattcacaaggcccattgcaggtcaggagcttgtttcagctgagtttgcaataagactggtctagtggcccttgatgaaagcacttatgtgtagcttctcttcttaattaagtctaaacaaaactatgtattgtcttctgcatccttttcaagatgaatgatattaaaaatgattacatgataataatgaaactagagattggaaaaaagcccccgacatccaggagctggctgggaactcccacctgggccttggtgttctgttattgaagataaacaatttcacaaaacactaacatcagacaaaacagctctgtgaccgagatggatcaagacaaaagaagacccctccgttatcatgtttgaacatagacaatagcatgagcattgttcaaagaaaccacaacaatgaccaaacatctgttcttttgtctaacgtgactgaccactgcttctttacccataacagcattagcctggcttcatttctctcatcttatgaacaagatttattaaatatctgctatggtttgaatgtttgtcccctctgaaactcacagtgaaacttaaccacaattatataactgtgctaagggggtgagaaatcttgcccacatatttggtcaaacatgattctatatgtatctgtgagggtgtttctgggcaagattaaagccgaattggtaggctgagtcaaacagattgccttttctagtgtgcatgggcctcatcccatccatttaagacctgaaaagaacaaaaagattgagtatgaagaaactctgcctgcctgatggctgagctgggaccttggtcttttcttgtctttggacttcgagtgaaacattggctctccttgggtctagagcttgatggctttcagattggaattacacattggctttcctgggacttcttagcatccataatcatgtgggccaattccttataataaacttattctctctctctctctacacacacacacacacacacacacacacacacacattcttatataagtatatacatatataccaatataaagagatataaatatgtatgctaataaatagcactatctctctatatgtcttattggctttgttactctggagaaccctgacaaatagaaatttaatgttatggatttaatggtagtacctctccaaaattcatatgttgaagccctaaccaatgtaatggtatctggagacagggaggtaattacttttgagaggtaattagagtgagatgaagtcatgagaaggtctagtctgattagatcaatatccttttaagaaaaggcacctgagagttaacttgagtgttctctctctctctctttccctccctccctctctctctccctctcgctttctttctttctttctgtccatgtgtacataaagaagtaatgtgagtgcacagtgagatggcagccacccacaagccaagaaaagagacctcagaataaaacttaccttgctagaatcttgatcctggacttttcagcctcgataactgtgagaaataagtttctgttgtttaagcccacctcccaaaagagggtgggaaatctaaccacggtatttgagaggcaggatatttaggagataattagatttagatgaggtcagcttcctcaccatgtcatgctttatgcagcaaaaagcctctgcagagagtcctcaccagcattaaggcccttacaggtgcagcctcttcaccttgaacttgccccgcctccagaactgtaagaaataagcctattttctttataaagtacccagtctcaagtaataattatagcaacagaaaacaaatcaagacaatacccaatcatagaattactcccactttctggcagcgtcactccagagttaggtcctacttacttgaaccttcccccaaatcacctaacacaagcccaagtttataatacgtccttcccaacaccctcttatgaaggcatctcattgtttccatgttgtatgctttagctcatgacaagaataaactcaacttggtaccctacaagtatgtgactgatgggctttggctggagggcagtgatagaaatgaggtacaaggacagcagtttgggaatcccagctcagaggcttggctgactgtgcctaataccgtgcttggcacatggtaagaactcagcaaatgtttcttgaatcaatgaaaagaatcaggcagctcctgttgaaactaatgtgcatgcaccttggagctttcttgccattggccatctcaccatgaggctgttaattttgcaaaaatattcaaacataattaagagtccaatagtattaaattaataaggatgtgtgcttaggctatacaaataaaagagaaagccaagatacctttttaaaatgccatacaaaattcaaaattctttggtaaaaattaataaaatatgtctaagtccaaaatggagacaactgtgcctcttcgttaaggaatctaccagaaaactaaagacaataaagagaagtttcatttctggatataatgactcaatatggtaaaaaggtgggtccctcacattaaattattctataaataattacttaatggttatttttgaaatagacaaaatcatgtttaggtttacctggatgaataaacgtgtgagcagagcaaagaaaatttcaatcatatcaagtatcttctcagaccacagtggaataaaaccagaaatcaattccaaaaggaaccctcaaaactatacaaatacatgaaaattaagcaatctacctctgaatgattttggggttaaccatcaaatcaagatggaaatttaaattttttttcaaaatgaatgataactgtgacacaagttatcaaaatctctgggatacagcaaaagcattgctaagaggaaagtttacagcactaaatgcctacattaaaagtctgaaagatcagaagttgacaacctaacatcacatttcaaggaatgaaacaagaacaaaccaaacccaaagctagcagaagaaaagaaataacaaagatcagagcagaactaaatcaaattgaaacaaaaaaattataaaagatcaatgaaacaacaaggaggttatttgaaaagataaataaaattgatagaccactagctagattaaccaagaaaagaaagaagattcagataagttcaattggaaatgaaaatggagacatcacaactgacaccacagaaatgcaaaagatcatttgagactactatgaacaccactctggacacaaactagaaaatctagaggaaataaataagttcctggaaacatacaaccccatagcttaaatcaggaataaatagaaatcctgatgagactaataacaagcagtgatattgaatcagcaataaaaaaaaaatgccaacaaaacaaagcccagggccagttggattcacacctaaattctaccagacattcaaaaaagaattggtaccaatccttctgaaattattccaaaagacagagaaggagggaatcctgcctaacttattctatgaagccagtatcctcataccaaagccaggagaggacataacaaaataggaaaactacagaccaatattcctgatgaatacagatgcaaaaattctcaacacaatactagcaaaccaaatccaatagcaaatcgaatccaatagcacatcaaaaaaataattcaccatgataattctaaagatgcagggatggctccacatacgcaagtcaaaaaatgtgattcatcacataaacataattaaaaacaaaaaccatatgatcatctcaatagaggcagaaaaaacatttgataaaatctaatatccctttatgataaaaactctcaacacactaggcacagaaggaacatacctcaaaataagaaaagccatatataacaaacccagagcccacatcatactgaattgaatggggaaaagctgaaagcattcaactgaagcaagacaacgatgcccactttccccacttccattcatcataatactggcagtcctagccagagaaatcaggaaagagaaagaaatcaagggcctccaaataggaaaaaaggaagtaaaactacctctgttagaaaaccctaaagactcctccaaaagactcatacatctgataaatgaattcagtaaagtcttaggttacaatatcaatatacacaaatcagtagcactgctatataccaacaatgaccaagctgagaatcaaacacgatctcaggctgggcatggtggctcacgcctgactttgggaggccaaggcaggcagatcaactgaggtcaggagtttgagaccagcttggccaacatggtgaaaccccatttatactgaaaaaaaatataaaaattagccaggtgtagtgacaggcatctataatcccagctactcgggaagctgaggcaggagaaccgcctgaaccaggtggcagaggttgcagtgagccgaaatcgtaccacttcattcactccagtgtgggggacagagcaaaattccgtctcaaaaaaaaaagaaaaaaaaaagaactcaacccctttaatagctacaaagaaaataaaacactttatttttaaaacacttaataaatatactctaccaaggaggtgaaaagatctctaaaggagaactacaaaacactgctgaaagaaatcatagatgacaaacaaatggaaaaacatcccatgttcatagattgaaagaatcggtattgtggaaatgaccatactgctcagtaatctacagattcaatgcaattcctatcaaaataccaacatcgtttttcacaaaataaaaaaaaaaacataaaattcatagggaaccaaaaaagagctagaatagccaaagaaatccgaagcaaaaagatttattcttagaatcacattacccaacttcaaatgatactacaaggctatagtaattaaaacaccattgtaatgatataaaagtagatgcatagacaaatggaacatgatggagaactcagaaataaagccaaatacttacaactgactgatctttgacaaagcatataaaaacataatggattagacacacaatttaaggagaatacaacttattcaataaacggtgctgggaaaatcaaatagccacatatataagagcgaaactggattcctatctctcaccagatacaaaaattaactcaaggtggattaaagacttaaatataaaacctgaaaccataaaaattctagaagaatccctaggaaaaactcttttggacattggcctgggcaaagaattatgtctaggaccccaaaagcaaacgcaacaaaagcaaaagtaaatacatgggacctaatgaaaaagcttctgcacagcaaaataaataatcatcaaagtaaacagacaacctacagaatggaagtaaatatttgaaaattatgcatccgacaaagtactaatatccgcaatctacaaactcaaagaaatcagcaagaaaaaacagataatcccattaaaaagtgggcaaaggacctgaatggatatttctcaaaagaagatatacaaatggccaaaaacgtgtgaaaaaactgctcaacatcactaactattagggaaatgccaattaaaaccacaatgagatacgaccttcccctagccagaatggccattattaaaaagttaacaaacaatagatgttggcatggatgtattgaaaaaggaacacttacacactgctggtgggaatgtaaattagcacaatctctacagaaaacagtatggaggtttctcaaataactaaaagtagatctaccatttaatccagcaatcgcactactgggtatctatccaaaggaaaagaagtcactatatcaaaagacacctgcatgtctatgtttatcacagcacaattcacaattgcaaagatatggaatcaacctaagtgtccattaactgatgaatggacaaagatgttttatatatatatatatatatatatatatatatatataatcttgaaattttatatatataaagatgttatatatagattaatcttgtatatcttgtgtgtatatatatatgttagatatatatcatcttgaaattttcacatgcatatatatatatatatatatatacacacacacacacccccacacacatcgtgaagtactactaagccataaaaataatgaaataatgtcttttgcagcaacttagatggaactagaggccattattctaagtgaagtaattcaggaattgaaaaagcaaataatgcatgttctcatttataagtaggagctaagctttgggcacacaaaggcatacagagtgctataacggactcgggagactcagaagtggggagggtgggagggaggtgagggatagaaaactatatattgagtacaatgtacactactcagatgataggtgcattaaaatcctagactttatcactaaacaattcatctatgtcatcaaagtcacttgtacccctaaagctattgaaatagaaaaaattaaaaaatgaaaaaacaagtaacaggtcatctggacacctcctgaaggacctgcctgagctgttttacagttaactttttttttttttataagtagaaggagtagtctaaagtaattatgaacaattagtaaatacataaaccatgaatagtcatttattattatcacaagtattacatagtgtacataatgtgtgctctgctttcgtacactggcagggcagtaggtttgttatgtaagcatcaccacaaacaagtgagtcatgcattaagttacaatgttaggatgttgtccattatcacatatattagatgtatgttaaccattatagctccatcttaagggctactgtcatagatgtggtccatcactgaccaaaatgttgttatgcagcacataactatataacataaaatctggattatgggccgggtgtggtggcttacacctgtaatcccaacattttgggaggctgaggcaggcagatcacttgaggtcaggagtttgagaccagcctggccaacatgctgaaaccccatctctactaaaatataaaacttagacgggcatggtggcaggtgcctgtaagtccagctacttgggaggctgaggcaggagaatcacttgaacccaggaggtggaggttgtagtgagctgagatcgtgccattgcactctagcctgggaaacaagagagaaactccacctcaaaaaaagaaagaaaaatctggattgtgtgggtctatgtatactgtatgtgtatatatacaaacataggcatgcgtatatacacaagtatatacaaatacacacacatatatacattccagcaaacagggtccctgctgctccacagatgtaaccaatttctcccttcagcctttgcccttgctaattcatttgcctggaatgctttctccaagacgtatgcacaccttgctttcttacatcactgtatcctctgccaggcattatgttatatacccatctccatgtctttctcaagggaatttgtgctgcatgacggtgaactaatacttggtcttattcagagcacgcaggatgtagaacaattcttgacactagggagcattcagtgaaccctgctgatgggcaaatgggtgggtctggtcaggggcagccagaagacaggaggagattccaagggaactaagcagtgaccccacagtcaaggaccatatggcactcagacttctcagcagatgccagtgtggaaggtaatggctgattgagggttcagaacatcagtgccactggccacaggggaaggccatggaacagaaggaccttaaatcaactgaaaaacattgaaataggcgcaattaccccaaagttaaaaaaaataataacattttagttgcttggtagaagggtgcctcaaaacagaaggatgaagaggaggaggaggagaacagtggagtggaaacataagatttttactggccccagtaatttttcgaaaggctgtggtggctcatgcctgtaattccagcactttgggaggccaaggcaggcagatcaactgaggtcaggagtttgagaccagcttggccaacatggtgaaaccccatctatactgaaaaaatataaaaataagccaggtgtagtgatgggcatctataataatcccagctactcgggaagctgaggcaggagaacctccctcaccaggtactgagctccctgctgtaagccaccatatgtgcccaggtccgagtgctgccatccaccttcagctatcctcccacggagctgttctgccccagcccaaagcatgcactgcaaatccctatagcttctcaatccagatctaactcctcattcccccagagccatttatttcagcaggattaccgaggggaacactgtggctgaatcgcactccatgaattggagatgctgctctctccttagctaattagtttggatgcctccagctgcaaatgcaaaaaccctgacccacattggcctagacagcaaaggcaataaagtcccaggtgatctcatgtactgccagacatcatggggtcaagaattaaatgggataaacctcttttgcagagtcccgtattaagaatacggaaatcttctccagaaactcctcaaaagaattgtttttacgtttcattgtgcaaattctggttgtctgcccatccttcaatcaaagggagctgctgcgtttgatgggtcccggccagggctcacacccagtggctttgatggattcggactcttctgcttaggcaggggatctggcctgtggtgggcttccctccaacacaagaccgcaaaagagttctgttgtcactgagtgtatggtgtcccggggctgctgtaacaaagttccacaaactggggtgcttaaacaacagcaatttattctcacatctttctgggggccataagtccaaaatgaaagttctggcagggctggagtccctctgaagtttctacaggagaccccttccttgccttgcccagtgtctcttggcctgtggcagcataactccaatctctgtctttgcccagctatgttttccatctgtgtctgcacccagattgtccccttttaataaggacaccagtcatattggattagggatccggcggcctacttcagtagagcctcatcttcactaattatacctgcaatgtgcaagtacgctatttccaaatatggtcatataaggtactggaggttacaaattcaacatacaaatctagggggtggacgggaaataattcaatttttagcacagagaaaggagggaaattgaaactggagcagggatcaaattgcatctgctatatggaccctcctgttttacaaattccttttttaccccagagaatctttagctggtggaacttcaggctgacttaggaagggaaatgcatatgtttgggtggagctcaggatgccctaccaagggcgtggcagctgctgaggggtttccttcactaagcaatgtcccctccagcacacttacgttccctggattcttcccattctctgcttctgcctccagaaatttatgcttaaacaattctggggaccagaagtgcaaaatcaaagtgctggcacagctgcagtccctctgaagcttctgcgggagactccttccttggaaaaactcccagcaaagttgcagacgtatctggcaactggacttgagagtgaagcaggagggatctgagtgttgcatatgtgcaggataaattgttgggggaggactgctgggggtgctggtgactgaatttaggaaagtgcataagctgggtgttcacaaacctgggacacctcatattctatttcaggcactaatttgtcatgtttgggaaggacttaaactataattcagaaatgatgattgatatggtttggatctgtgttcctacccaaatctcatgctcaattttaattccagtgttggaagaggggcttggtgggaggtgattggctcagcagactgagtgatcataaagagcctgggaaacatgtggggttaattcaaggtggccaaagcttcaccatggggggcagcttgggggccgcttgggggcagcttggggctgggctacttcctcctccaagaagtatcacagagcaatgctaccgggactggagatttccatttagctaattaggggttaggataaagatttgtgggtactggtggcagtgggtgagggcagaaagtaaaggaggttgactatggattatccaggcatagatacacatgttttcaacagaaaaggagatgggttattatatgtcaggcccaacatatctgccctggcaatggcagggcttgagagtggcctgaggtcaaatcataacatggagatctgtccagaaatagccaagaccctgcagacggtcaggtcagagctgagtgagttggtgcatgcacatgtgtgcacttgcattctgacagtacagaaatctgatgggcacagcgacccacagaccttcctggattcagcatggaggagggagaccacattacataggctggactagagcccacgggctaactttgggagcttgggggttcactagattccaagagtaactgactctccagggaagcgcctgttcctgtttgataagcggtgctcttttgtcctgcatgcagggatcagaaaggacctatgcagagcagctcacaaaagcagagcggcttgttcactgtgggccacaggttcacgctgaaaccagtgttcccggaaacacgaggcttcagatcagccagtggcagaaagttgggagcggggaggatgtaatttgggcatctgagacaaaccttagggatggctatccatttaagagattcagtgggttttggagctgtgaaaggaaattaaattttgggaccccaaattcgtttagccaaagagaaaagtcaagctgggaactgggtcacgcaaatctgcctccaccttttggttcctaaacaagatggctacaagatgaaaagctacacgcttccctcatattttgcccacaaggaaattcctggtgagctgttaaagcttccccatggcaatgcaacttgatagcctatctttacaggtgcagtcgctctgcccaccagacacaaatgtataactgaacgttcccctctccattttgtctgtggtatgtaaaatgcacattccccacagttttcctctgccccttttgtttatgtgaaagctgtgtgcttctcaatatctcatcctttcccctttaaatttggagccctcaaaatcaccttcggagaaaggaatagacctgtctcctgggagcatcctcaactttggcaaataaatatcctaaaatgattgagacttgtctcattattttcctcgattgacagagctattttttttttttttaacataaagtcattccctgggcctcaaacagttcctggttgggggaaggggcacataagtggcatagcttctgtagcccccgatcggcctggagcatagggcaggatgtcatcaccagaggccaaatttgattgcaagcagagcctactccctctgccttttctgccaagcctcctaatcgttatctcacatgataattattttgggtaaaacataaaccagaattgtgatgacagtgtagactcacagacaggaaccccaacagagctggaaagatttgcatgcagtaaccttccatcccattgattgctttccatgacaattccatacatgcttgctggctttcttctttgcctgtggcttccttatgcttgattcaataacaacaacaaaaagatgtgtgtgtatgtggtgggtgtttattgttaaaatgctttatttttggagtgatgtttcttgaaagcagtaagaaaatttcccatataggagaaaccctctgtgcagggttcgcaggatctcacagtgagcccccagaagcaggtcctatccggagagtttgggtctttaaattatgtttacagccagcaccaggccatcctgggagtccagacttgctgcaggagcagctgtcttaatttcctgacatcatccaattagacagcaaggtctcccctattgaatttagaaatatttgcagcccattttttaaaatgacttacagaaaggggagagtacttaatgtgtttatttagaccagtaaactctcctttatatctattttttttttcagtttgagatcctaaaacactttactgattgttcttaaacaactagggttaggcaaaagacattggccattagagttgctaaagacaccactccagggctgagctttggacgagtattagacaaggatgaaaatacctccccatgggccatggaggtcctctttcttcttcccttttcctagcctctggccttttaattttttttcagaataactttctggaaatgctcctatgcactgtgccatcaatatacattttctctttctttccaaccaaagaatcatttactctatgtatgtattggaatacttatttagagtatcttatgtcttacaatgtgttttcacatgtgttaccctgtttaattttcatgataactctatgaagatggcatagttcttcctattttctaggcctagagagataaactaatacaaacagtcatgaagaggtgcatttaacttatttaaatccacctgtccatgactagcttgtattagtttaagaatctaaaatttggccaactctatcatctctctttgaagtgtgttcactttaaatgttctcctctcccatctcctccatgtactgtagaacattcgaacagagagttactcttgcctggagtctttcagtttcttgtatctggcttctctgtctcctgtccctggaataccctatctagcctcaacagtcctgccttttgaaggcccttgtgtctttaagaccgaactcagatgctgcagcttttcgttccgtagtttcttagtcaactggggctgctgtaacaaagtgccatacattggtggcttatcaacaacggaaatgtattcctcacagttctaaggctggaagtctgagatggggctgccagcaggggcaggttctagcatcctcctccaggttgccaccttcttgtatatcctcgcatggtggaaacagagaacaggagagctctctggggtcccttcgataaggacactaattccatccctgagggctccccctttgtgacccaatcacttttcaaaggcctcagattctagtatcatcacactggcggtaagatttcaacatatggactttgaagggacacagacattcagttcattccacacggtcactgattctacaaacagaagcaaatcataccctcttccatgaaccctggtgttctgggctctgttccaccagttgtgtattctgccagacaggaattggacatatatccactcaattatccccagagagcaaaagctcctagagggcaggggccacctcatctccttagtcctccctgatgctgcacaactgccactgagtaccgagatctggagagaggacatatgggggcatcgtccattcttgaagcctattttccatgaagctttccttaattcccccaagctgacatttccatcctcctctgaatgtcacagacatgatccatgtgactcttcaccctgcattgtaatcagtggcttctatcttcttcctggttatctccccttccaaaacatgaggcttgtcactcatgagggtaaggcccatggttgattgtacttgtatccttcatagggtcttatatatattgggtcctagatatgtgtttatggactaaaaaattgtcttatgcatttaaagtctattaaaataactgcaaaatacacccctttccttggggaaagatggaccgactctggtcaacattgctcctcagattttaggtttcctttataacttttaaaaattaccatttcagctctggatttaaacagtaccacaattcgttatcaaattcttgcacatcatttcctccagagcatacgatttaaaagtcaaaaactaggtattgagtatgtgcaaaatatattccaaaacaaccccatttcataattataatccatttcacaatataaaactttaataaataaacacttggattttttttgttctgttggaaatagtggactaactaaaataaattcttcgtgagttaggatggatacttgtctgtttagctagcctttcaatatcatacacacacaaatacacacacccctgaatgccacttttaaatctcattcttctaataaatcatatagtagagacttttccaaactatccatagcagaattaaagttaaaaaaaagaggaaatccaagggccaggcatagtggcttatgcctgtaatcccagtgctttgggaggccaagaggggaggatcacttgagggaaggagcttgagaccagcctgggtaacaaagtgagaccctcatctttataaaaaattaaaaaaaaaaaaagctgggctcagtggcatacactggtagtcttagctactaagaaagctgaggtgggagaatcccttgagctcaggagttcgagggtgtagtgagctttgatggcaccactgcactctagcctgggcaacagagtgagcctctgcctcaaaaaaaaagtgggaggggagtctgaataaagccttgtaatcaagaagaaatcacagttcattcgatggaaaattccataaatgggcataagccattcactgtaaactagatgcaccatcattttgttaataagcacaactcagtaaaactggttcactttatatcctttccttggttgccagttaccaatgtatgagaataatttcattataacgcacctttttctatatattgggccagcagcgccagcattaagcctagtcttacacatttctgtcttgtagttgttcgctagtcacttgattttaaaatgatccttaaaaggaaatccatggacaagacagcttgcaaataacaaaatgcatgacaaaaggctttgtaaagagcacatctgagaccatgtattgagtttttccacgggaaaatcaacagggtagcaatgtgggtgttaaaggcagagacctactcatctgctaggttgcccagagcccataccaatggctgtgagaaccaaaggaagagaagaatgtggctcatgctccacacacaaggggccctgggcacactgtcaacaattagctggatgtttaccatcctcttcaatcatgtttccagaacaacaaaactttaaacccagctatatcacaccaacgggtcttcttttgtgttgcttttaaacaggtatgtatggagacaattgaaaaaggaagcccccagagacctatgtatttaaactaggtaaaacgaagcatttcttctctcttacttttaaccgtgaggtacatggacttgctgacgtctgcgcccacatcgttgctgaccttgcagaggtagtagccactgtcttcctccacgacatgcttgatcagcaacgacccattgctgagaacttggattcggccatttagggcaattggctggaactggggaaccccagcacctgagacagaaaaagaaagacgagcaatgatgcaaacgagagtaagtatgggaagacaacgagttcaagtacacacagactcataaagagatgcttcacactgatcccataaggcagtcacgggatacaccaggtttttctttctttcctccagtattaaaattcttgtttagagagaaaagcatttatttaaaatgacagtatctcagactctgagataaaaactaacagaacttacagatagtttctctacataaaaagccaaatttgatgagtgttaagtagctgataaattattcaaagaaatcacagtagaacaaccacagaagcagacaactctcatggtgctaaataaattccttgtgttcccagggacttaatatgaatgtaaacaaggagtgctccagggacatggcatttgaagtctttgctcactgcacatgtctgaggctacaaagagaataggaatattgcaggtttctctttaacggtggttatattccggtctagacacacaatacaccattaatatcatttaatgttatttaaataaatacatcagattagtgcagtaagacagcacagaattaaaacacctctctcctcagagtgcttccatgcaaggagggaatggcacagatatgatatgctattataatgaatgtggtatgattcatatgaaggatttatatacaactgggtaaaaaaaaaaaggattttagaaataatgaaacagattatgaaggtcctagaagacttctgggaagatggtgactggatgaacctgccatgctgcctgcttctggcctggaggagttgggtgggctgggagaatgggattcaggccttgaaagactctcccagggcatttttcttctctggcctgagtatctggggacttgaggggaaagctctggggtgaggatcttcctggaggaagctcaacgtttgggccaaagatgtgttctagagagaaggtgctagcttcctggcccaagaacctacacgggagctgaacaagtcagacgtctccacaggcctcaagcaggaaacttcagactttgcatctgaggacaggagaatgggagacacttcctcttgctgtctccataccctaatgacaacttgtgtattggtctcactcgagctcacaatggcagagactgtggctgtgccttcctttcccgtgtttctggtttagatttctcagcaacttgtctctagccccactgaagagacgagagaaattgataaggtacctaaggggacctttcacattgaatgaggagatcaagtagaatccccacaacaggtggttcccatcaaaatggaactgctagaggggacatacgacaacctgaatttttttttttttttttttgagatgtagtcttgctctctcacccaggctggagtgcagtggcacgatttcggctcactgcaacttccgcctcctgggttcaagtgattctcctgctaatcccagctacttgagaggctgaggcagagaactgcttgaacctgggaggcagaggatgcaatgagctgagatcacggcgctgcactccagcctgggcgacagagtgagacttcgtctcaaaaaaaaaaaaaaagaaaaataataagaagaaaataaaagtacacgaatgtagattgataagaatataactgtatttactgacagataacatgattttctacatagataattgaaaagagtaaacaaaaaagttgctataactataaaatgagtttagcaaagtcatgggatacaacatcaatatacaaaaatcaatgtcaattttatttatgtataatagtaacaaccaattgggaataaaaattaaaaagaaaatatattggcaaaaaaccataaaatatttagaataaatttaacaaaatatgtgcaagaccagcccactgaaaattgtaaaagttgttgagaataactaaataagacctaaataattagagagttataccatgttcatgaataaaaatgcttaacattttcagaaagaggttggtaatctttctgtaaaggccagagagtaaatattttaaatttagcaggtcatacagtctttgtcacaaatactcatctctgccactgagtcatgaaagtagccatagaaaatacagaaacaaaatagcatgattgtgtttcataacaacttattggcaggccatgacagctcacacctgtaatcccagcactctcggagaccagggtgggggcaagacttgagaccaggagtttgagactagccagagtcacagagtgagccctcatttctataaaattttaaaaattagctggacatgttgggtcatgcctgtagtcttagctactcccaatgctctgggaggctgaggtgggtttgaggttacagtgagctccactgtactctagcctgggtgacagtgagatcttgtctctaaaacaagtggaagaggaggaagagaaggaggaggaggaggaagaggaggaggaggagtcttcaaaaatactgaatctgagaagaattgatctttgtcctagcatatagtgataaatgttggtgatcattatgaggaaataagatagtctaaaaaacttatttacaaaaacaaaaacaggatgtgggccaaatttgaattgtggcccatagttttctgatatctgttttaaaggtaattaagagaaatgtaaatgtaggataattgtacatttagaagagggaacatctactaacaaaactcacatgtttgcattagttctttattacatatctaaaatatgaattttcataaaatgattctaagtagaaaaagtttttaaaattcttcttttcataaggaattcaaagtcagggataaaaacatttaaaaacataacagtattttattatctcttcaatatgttttcctcacttgagctaatgagtattttataaagtgagactaaaaggacaaccatttttatccctaaatctgctccctccttggaaataagttatcaaaatgtacaaaattcagaattacaccagcaacttgtataatgtagataatttaaaacttaattcatatgagacttttatgtggccaagaaacatatgaaaaaaagctcatcatcacttgtcattagagaaatgcaaatcaaaaccacaatgtgataccatctcatgccagtcacaatggtgatcattaaaaagtcaggaaacaacagatgctggagaggatgtggagaaataggaaggctttcacactgttagtgggagtgtaaattagtttgaccactgtggaagacagtgtggcaattcctcaaggatctagaactagaaataccatttgacccagcaatcccattactgggtatatacccaagggattataaatcattttactatgaagacacatgcacacatatgtttactgcagcactattcacaacagcaaagacttggaaccaatccaaatgcccatcaatgatagacttgatcaagaaaatgtggcacacatgcttcacggaatactatgcagccataaaatagatgaaactggaaaatggatgaaactggaaatcatcattctcagcaaactaacacaggaacagaaaaccaaacacctcatgttctcactcataagtaggaattgaacaatgagaacacatggacacagggaagggaacatcacatactggggcctgtgagggggtgggggcaaggggagtaagagcattaggacaaatacctaatgcatccagggcttaaaacctacatgataggttgatgggtgcagcaaaccaccgtggcacatttatacctatgtaacaaacctacacgttctgcacatgtatcccagaacttaaagtataataattaaaaaaaaaaccttaattcatatgaaagttcacagcagattttggtgccttttttttttttttttttgagacagggtcttgctcttttgcccaggttggagggcagtgacaccatcatagctcgctgtggcctcgaactcccgggttcaagcaatcctcccccctcagcctcccaagtagctgggactataataccggcagacaccaccataccccgctaggcctttaaaaattttttgtaaagatggggtcttgcttggttgctcagactgtctgaaactcttggccacaattgatccttccaccttagcctcccaaagtgttgggaaaataggcacgagccattgttcttggcctcaaatgcttgagaaaaaataaatacatcagtataagagtggttgattttgaaaaataattaatgaaagctatttactagtttacttattgggatttaaagcatgagaattttggattagggaatctgaattttttgtcaaaaattcaaacagtaaaaaagtaaataccttcagagagattacggactttctaatatcttctaaacataaaataatgtagccttcgtttttatgcaaatggactttattaattactgagcacctgtactgtgacaaatactgggtgaggagctatggctaaaaagatcatgactgccatctctttttcttcttccctctctccctcccgctcagtcttaactctggggaattccagctaccatgttgtgagctgctctgtggagaggctcccatgggaaggaactgggagttggtcttcagtcaacagtctgagaaagtaaagcttatcaaccatcacaggagtgagcttgggagaagaccctcccacagctaagctttgaaatgactgcatcccagccaaccccttggctgcaatgttgggaagatggtgaaccagaggtctcagctaagccacacatgcattccagacctacagaaatggaagctattaaatgtatactatcttaagccactaaattggggtaatttgttacaaagcaatagattcctaacgtgtaaaattaggtaagttacataatatttcagcttcttaacttgtaaaatggaaataataatagaaccttcattatgggatggtagaagcactgaagttcttgaactatgtattggtatggcttatagtaagcaaacaacattgttgtgctttctaacattctctttttaattatttaataattttaagattatatggctgtctgtctttcccattccacaagaatagggaccacgttgcaatgaatgtctccactcatcaatcagtgcatcagtggagagaaatatatatatatagcggtaggcaatctgtatgcttaattcagggagaagaatttcggaccaaaggtgatgcatattcaaatcttaaaatatattaccatatttacaataaactgccttaaaaatgtacaaacgttatctccttcagtgctagctgagggttaattttttcctcatacatgtatgctattaaacttttaaatctgcatcaatgctatacatcactattttaatttgcacattttggcggattttttttgtatttttgtttgtttctgtttatagataattttgagcatcatgaatgtattggccatctgtatttgttctttagtaaacagcccatttatcccttacccatttttctactgagcttttgtctttttcttcattttccaaagcactttgggttataaggaagtgtttctatgtaattattttacaaaactctttttttgttctcgttgcttcaatcagaagaggatgttgaatattatcagctagtttttaaccatatattgagataatcatttttttctcctataaaattagactgcatttttaaagaatttggcttttataaattatcaaattacttcttgtggatattgtgttcattagtgtgaggataatagatttattggaagttaaaattaaggaaaaagccttcaacttttatttaagtgcttaaatttgtaacacactttgaaaatcagtaaaggctattaatgtcgttcccaaagttgactgtaaattgagaatagatttagtccaatacacacaacctgaaaactcaaccaaatataggattgaaaaaatataactataagataggtaatctaggccgggcgcggtggctcacgcctgtaatcccagcactttgggaggccgaggcgggtggatcacgaggtcaggaggtcgagaccatcctagctaacacggtgaaaccccgtctctactaaaaatacaaaaaaaaaattagccgggcgtggtagcgggcgcctgtagtcccagctactagggaggctgaggcaggagaatggcctgaacccgggaggcagagcttgcagtgagccaagacagcgccactgcagtccagcctgggcgaaagagcgagactctgtctcaaaaaaaaaaaaaaaaaaaaaaaaaaaaaagataggtaatctaaaaatttcaaattatataaaactgtatttaagaaactgaaaatcaaataacatgctggtgtggtttgaaaaatttacatgaatatccatgtcaacaacacattgttttccttttcttaaataattttcaccagaaaaatgcttgtaattgttgaaacatttatattaaagaatcacaacataaaattaactacaatgctaagtcgtctcaattaaatagcagaaaaggatgatctgtttattcctatctagactgaagtaagtttctttattactaaaaggtcctaatgaagatagaaataaagtttcaaatgcatttaagaaaacattaaatcttttcttcatcagaaaaatgaacctaagttgaagggttattgcatctgaagatctaattgtggttactaaatggaataatagtgaacacactgccaactgattcatctactatgaggactacagttccaagggctagcatttgtttaattggagggaagtagacttcgccagggtttgacagaattatttatcagtcatctactttagattcatctttattctaaagagtaaaatttaacccaaagcatcaatatgtaaaatcctgtaatcttcttagcacaaggtaagcactttaggtaattagctagaagatacaatgtggtaaccagcagtcattaattaaaacactgccaattttctgtggctagcaggggtcaagtggggacaatttcaatgctccgttacatgaaaataaaatgttaaagcattatgtaaggcacatactgaattgctagttatattaattctgggtcacctttcttatttattgcaaatatatgcatagctgtgttcacagggactgagagtatggggacagtggaaaaagaacggcagattgtcaccaaatgagcccactttgaaggcagcagcaaataagaaaattgtttcaatttttttccttcactgttaagtctttgctggtctgtagagagggcacttggataagagtcaaaagggttaggttctcatgctctctgaaactacccatgccttacagcaagtggcttattttctctgcatccttaatttcatcatatatgaataaggagaataatccatttacatatgatgtaggattgttgtgcacataaagtgaagcaagattgtatgaatgtgggtataaatgcctgcatgcaaggagagcttggtcaatgagctcatccagaggggtccccttgtagggtgaaataagactgaagagtcgcaggaccatggaaaggaggtctctttagcctcaccaatggtttgcacaatggtcaggcggtaagctgttctttcttttcaccaaggaatcaaacacaatccctttcatccttatggagagagtggtgttttcctcaagaatgcatttgtttttcttctttaggaaggggggtttcctctctgagaatagttgggggattgcaggaaagcattgggtaaaaagatagaggttgcaatggaaagataagagaaaaagcaagaatagcaacagcagttgcacctaaataaggtttagtagctgaaatacaatgcttattcagtgaaggagtgctgaagagttctgttacaaagaagaatcccgaagtggacagaggtatagtcctgagacaccactggcttggttccaggctggagagctatttccaatccctgagaaagaagcttccaccactgtgcaggtaatatttatgacactgaaagtttgtgtcagatgctgtatgttgatctttagcactaccactttccctctaaactctgccctaaattgcagggcttgaaagcctgaaaactacattccctggctttgttactagattctggtttacattttaccagtgagaggcacttaaaaacaattttgtaggtgcaagggtggaaaagccattattttgctttagaagcagcaaattgatgcatgggtcaaccccaaacatcaggtttatggctgcctgtgggagaactacaaatcactgcttgagcactagaagcagctgttagcagtgacgggagaagcatcttagttcctacacttctcaggtgcttaaagggccgcgcagtttgtccacgcttcaaaggattttgcatgcccctaattccctttattaaatcccttcttgataacacaccacaccatccaggtgtgacaccgtccaggttacttcttttgtaaatgtgcacataattgtgtccactgtgcaatccagtcatctttccttaataccttcatttctatgttgaagaaggctatccaatgacaacaatggaaatttcatggtctagattagtgtctaatcaggatttgttacaacttgctagtccactagcacttcaatgtctaattctgtaactaatacgtaattatgtaactaatacataagaatcctttttttttaaatcagccagagggaattggcccttcactcacttatcagataattgatccatgaactgaacacaattcagcactcgtcaaggggtcatgtgatattggaagtggttgaggtgactcaattatgcagattccaccagtgctttgccttgctcctgggaggagccctgcagcagtgtctaccattcaaggtctccagccaccgtttccctggagcaagagccccccaaacatttgtcttcagtgtgactgcctacacctagaagaaggcttccagaaagtttcccaggaaataaatgagggggaaagatggaggagtgctgaaaaataaagaaaggaagagcaagatgggccccagggttgactgtcctggtggctccaccaaggctcagggtaattacacttccttaggtgaggaccctgcagaggtcctgcagcagctcccagggccactgagatgctgattagggtagcacagaggaaggcaggttttctgctctgctaaggtttttcctaccatcaaaggaagaaaataaaacaatatatggaacactcactttctctgttcagcttacaacttgttttcaagaactcattatttctttgtgaggccccttgtctcttcttggggaacacacaacacacaagcagagctccttttgttgtgcatgagggatccatatcggactttgaacttgggtttatttttaccatgtgtgccatagagagatgttgccttcttctcgtttttggattatttgaattctttccccatattaattcaatatttgcatcttatcacctaattggaaatcggggtgctgggtgagagccaggacttgatagcctggatcagaggagtgcactggggcagagcaggggatcactgctgcttcaggaaatgaaggacatggaagaggtcaaaaccatgggtgtggagtcttggggtgctctaaacaacacagagcaagacaaatggtgagtctaggaatgggcatggtgagagcactgaatagtgtgcagatgcacaggcaggggtgggacagtgggagggcagcagcctccaccaggtcaggcttgtggtcagaagttttattctggtgatccacactaagaggattaagatagggccaggattggagccactggtcccaaggagatgaccaagacaagggtcagagacaatgcagagacccaatttctcagaacagggatgcaaaagagacacttgtctgagcaaagcctgtggaactggcattcaaggtcagagtgagtggcagcaagggcaaaaaaagaatgagacgaaatgccttggacactgaacctgggggcactcaggcacgaggctggcgcagagtgaaacatgcaagggcatacagagcaggacaaagggaccagaacttggggagaagccttggaggacctgaaaactcagtatcatcccaactgggccctatgaacgtgctccctattgagctattttaatataaaccccctgctttcccagaggaaaaacaaaagagaattttatttaagcaaatttctgtctcttgataatttgcttctttccagacttatcttttgaatgtacaacctgcagtgtgttcagcagtgtgatccacaggtgatcctcagtgtgatctgcagtgtcatctgcagtgtgatccacagtgtgatccatggtgtgatctgcagtgtgatccacaggtggatctgaagcgtgatctgcagtatgatctgcaggtatctgcagtgtgatccatggtgtgatctgcagtatgatctgcaggtatctgcagtgtgatccaaggtgtgatctgcagtgtgatccacaggtggatctgaagcatgatctgcagtatgatccacgttgtgatctgcagtgtgatccatggtgtgatctgcagtgtgattgcagtgtgatccacagtgtgatctgcagtatgatctgcaggtatctgcggtgtgatctgcagtgtgatcacagtgtgatctgcagtgtgatctgcaggtgatctgcaatgtcatccacggtatgatccacagtgtgatctcaaggtggtctgcagcatgatctgcagcatgatccacagtgtgatccacagtgtgatctgcagggtcttctgcagtgtgatctgcagtatgatgtgcagtgtgatcacagtgtgattaacaggtgatctgcagtgtgagccctctcttgactgctgaggaagggactgacttggtcatctcaccagagaggtctgaaactggtgttggcagaaaatctgctctagaattaacctgcttgagggacttaggcttgtcctttccctcatatttctcatggtcttctgagacataggccatgaggactacagaaggttccagggatgtcccctggacattgggagggaagttgtgggcaggatcaaggtgagcctttccagggcatgcccctaaagtaggaggggactccagagagggtcacctgagcagtttggccagtattgagcacagcatgtgttttcccctccatcttgcatggaaacgtttagttaactgtctggagtgcctagttttatttctatgaatctctcaacaaaagaatcaagttcctgttgccccctgtgatgagtctataaccacaggggaggatttctccaggtgggctgacactgagcagaagagggtgcttttagggccctagtggtaagggacagccaggccctctgggggactgtgcgtggtgagtgcagaagtgacagcctccagcagcttgtctgggtgcagtaggagaaggaggagctaaagcaaacctgtgtgtgcaccaaataatggtggattctctggagcctccagggaaatatggaattggggaaactacaatgagcagaaaggacacaggaaaaggggcagggagaaatacaatctcaagagagacaggaagaaatagagtcacacaccattgcagcccttagtatgagctacagagtggggaaaatagaaactcctctaaattaagaacagcattacccttgctgggagaagaaagagatgtggacagctacataaggacaagctcaacaaagattggctgtagacagctcttgacccctttccgcccagaaaaccaaggaggacaaaagaaaaccagatgccgtagcttataaaaattcactaccactgacaaatggaaagaatgcaataaaattattaatgttcataaaagaaaaacttggatacatgaaaggactatccatggtattggctgggaagactcaatattctaatgacatcagcattcttcacgttaagctttaaatttatgatcctccaaattttccagattttttggaaacttgataaagttatcttaatatgcatctagaaggaacaaacaaacaaaaatccatgcagaaaaagcaaggacatttttgaaaaataaaagtcacaaggggagtattgtcaaaacagacattaaaatagaaggagataaacttctaatacgtatggtgctgaacaggcaattgagtgtaacagagagaaggctgaaacacagactccagtattcacattttccccttagacaataaggtatcgcaaatgaaaaagtttgggctcttcaataaatggttttaggacaaatggctaaccatgtaagttcatgataatggcaataatgatattaataatagctaatacatactgactaatggctatgtgccagaagccataataaatgctttctatgagtcatcttactaaatcatcacatttatccccttattttatctgtttcagctgcaaggatgctgtggttcatatggggtaggtaatttacatgcagtcacccaaccagacagggttgtattatggctggggtttgaacttatagcccagtctcctaactgatgatttctactcctcctcctagattcctactttatttattttactaaaatcaagtccaaatttaatgaccctttgtatataaacaatagaatttcatatttgaagatggaggcataaaccagcacttcttctcttcctgggaacaacatgaaagcaaatgggagagagaagcctagaaaaatgtaacctctatttcctatgaaattagaaaatagctaaacttccagctacagaatgggtaaatgggcaaccaacagggtaattgagcagaagagcatgcaggaagatgagggaatcagggccaccgctgtgaacttcagaagtcccagcagagtgggtcacaggtgagagccaagcctccatcagtgaaaacagtgtgcataggtgggtgtgggtggcacttccccaggcctgatgtggcttagaattttagaagtagggttagctgaggaatcaggcatttgtacacaacaatctttttctggggacatggattttcttcaaatgtaagtacagtagttccccctcatccacattttcactttccatggtttaagctacctgaggtcaattacagtcttaaaataggggagtatagacacataagatatgttgagagagacagagacagcacattcacatagcttttattacagtacattgtaataataattttattctagtactcataatttttgtcaatctcttactgtgcctgatttataaattaaactttatcaggggtatgcatgtgtaggaaagcgcatagtatatgtagggtttggtgctccccaaggttcagtcatcccctgggggtcttggggctgctgtattcgaaaggaaaccaagacctagcaaagatacaataagcaaaatagaagaaaaaaacagaacaagaaaccaggtattacgacttagatgaagactgtgaataaaacagtcacttgtctataaagccatggctgaagaagggtgaactgtgagctggcagagctggagagaaagaaggagaaaaaatataaactcacagcagtgaaggcagaaccggagttggcacaaagaagaacagaccttgctggggaaaagacatggagaacagaaatggaaaaatatcgaacaaattaaaatggaaatcaatgagttaaaaaaccagagagaaaatgacagctacagagactaggtggcaatcctatggaaccacaatcagagaccctgaagaagaaaattaaagcagggaagagaacacttagagatacaattcatgggaaaaatattttttaaaataacctgaatctacatattaaatagatgcaccacatctatgggaaaattgaccccaaatggaaaacaccaaattatagactaaaaatttaccagacttcagggcaggtgcggtggctcacgtctgtaatcccagcactttgggagaccgagttgggtggatcacgaggtcaggagttcaagaccagcctggccaatatggtgaaaccccatctctacccaaaatacaaaaattagctgggcatggtagtgcatggctatagtcccagctgcttgggaggctgaggcagaagaatctcttgaacccgggaggtggaggttgcagcgagccaagatcgtgccactgcactccagcctgggcaacagagcgagactccatcacaaaaataaaaaaagaaaataaactaccagacttcaaagtcagctctttggtgcacagaaccaaaaagattaagttccttctacagggaaatcaggcagtctgtgctccctccaaggagacagtgtgagccgccaatatctgtcctttgggtgtaaaaaggcaaggaacaaaccattgcaaaccagaaagaggttggaatattcttcactatgtccaaataactcatactgagcacaaaatcaatctaacacagaactggcaattgcaaaagttgggcatatggctgcagaacagaacatagagggtctaagctctgacaatgcagaaaatattcatcaaaatctaggatatttagaaaatttatcattgcttatattggaaattgacagctgtatctgcatagagaggagcccaaaaccctgatcttaccccagccacaggtctgccctcctggagtcgtcctgtctgtcaccggcacttccactatcctcactgcctggggttctccccttttgtcacacccatagtatgtccatcactcaaagacattcagaatccatttgtccctcctccactgcagtcaccctggttccggccacatcccggccaaggccttagaacagctctccggctgaaattcctgtccttcacacagtctgctttcaaaacagcatgccagtgtgatccttttaaagcatgaggcagatcacaccatctctctccaattacccagctagcctcctagcttctggcttcagcacagcagcagctgaagagaccgcatcaccatcaccactctcattgctcaccatacccactccccacttgggcagagccaggtccttacaatgactgatggggacccagtgcaggagtctcctctcccaggacttcctttcactaactctgccacagctgtaatgtcctccttggtgtttctggatcattccaggcatcaacctcccggcctcgccccctacccccaactcttgggaactagctggcccctcaccttccggtctccctcggaggacaggagcacaggactcatctgtctttaagtctttcctcagactttccctactcctggggtattttgacaatgctattttaaatgcaaactactccccattgtcctccagcgtcaccccccaggcatgctctgactcttctttttggacattcccacaaccaagtttccctgaaggtcagagactctatggacagccagagagagcaaaggaggcccaggccaggccccaggctgatgcatcatctattctctcgcatttgcagtccctcttcgcttctcagcaggtaacaaggagatggccctgaactattttccctccagtataagtgacatacatgcaagagaatggcattaagctgtggacttctgggagtacaggtgagacccacctcagaatgaagccctgattttttttttttaaatctcttttaggcaagaggcctcatttgttcatgtaaataaataaatcaaaaaagagaactgaatgtctcagactttgtgtatctagacccaaggtcaaaaatgtaatgactttttttttttttttttttttgtagcaaagattgtttcatttctacaatagctacctttaaactgcagtgatttaccctggaattctgcctcccctgaattaaactgttgcatctctcaaggaaacaagctgaatctgttttgtttatacagttttgtcatttatgagggagctgcacttcagctcttagtgatcatttcattgaaagaaaacatgttccataagcaaggctaaattgttcttaagaaatagatttactgcttgcataattaaaataacaatataccatatttctctatcagattggaaaatgtcaaaaaaaaaaagcctaatatccagtattattttggttataagagacagacactactgcaaactgaggtgagttgtgtaaatgaataaaatgctggcaaattgtcaatacatattgaaagttataaaaattatttactccttgagccagcaactctacttatagaaatttatccccagggataaatgaacacatatacaaagataaatgtgacagaagtcattagaagtcattatgatatctttcttttccttttttttttgagatggagtctcgctctgttgcacaggctggagtgcagtggcgtgatctcagctcactgtaagctccgcctcccgggttcatgccattcttagcctcctgagtagctgggactacaggtggccgccaccacgcgtggctaatttttttgcatttttagtagagacggggtttcaccgtgttagccaggatggtcttgatctcctgacctcatgatccgcctgccttggcctcccaaagtgctgggattacaggtgtgagccactgcacttggcccattacgatatttttctaaaagaaaaactggcaaaaaccaaaaatatgacattcaacaatagtgttggagatatccagttgccaggtatccaacaccccctctgacttaggaaaataacacacattatgtccatgatggcttacggaccctttatagccaggggcgacccggccagcgatccagagagatgctggcaaaattgatctgtgatgcacttctggaaaggaccttaaagggaggtgagtcgtgtgggaggggcagccatctccctttgctcttcctcctacagggaaatgtgaaaggaagttgacactatagcttggtggccatcgtttgaggatgaagaatgctgctaggagaggcagaactcttcctaacacataaggagtttgggtgcctgatgacttagccaagccaacaaactagtcctgagctgtcgacatccagagtcctcttatgagaaaaataaacccttgtgaatttaagtggctgaactcaatcttaactaaagtaattagataaacgtaattattgatgtactacaataaacattacacagacattaaaaagtcacggagttcaaggccagcctggccaacatggtgaaacctcatctctactaaaaatacaaaaaaattagccaggcttggtggtgtacacctgtaatcccagctactacttgggaggctgaggcagaagaattgcttgaacccaggaggcggaggttgcagtgagctgagatcgcaccactgcactccagcctgggcgacagagcaagactctgtctccagaaaaaaaaaagtcatattaagcaccatatttgttgttatggcaagacatacatagtatattgttgactgaagaaagattataagccagcaacaatcatcaaacttttaaaaatgtataatgtgtatctatgggtatgcaattgcttggggacaggactgacagtctagagacaaaaaatgtttgcagcagttatctttgatcatctttgagtgatgttattggggggaatttaactttttaaaaaattgcaatttctaatttttttctttgatgacttgatattggatatgaaatttaaagacaaaaaagctactattacaacctaatttttaagttagtggtaagaagggataaaatgtcagtaacatccaagacagacaaagtattatttaatctatgtagaaacacttccaaataaataagacatagagataagcgtgcaagtaacatgaataagaaatttcccaaaggagaagtagaagtggtctgttaacataagataaaacatgttaaacaacattaacaatctaagtatgcaaattaaaatgagagggcattttcaaccatcaggttgtaaagactatttaaaaaaaatgttatctagttggtgaggatgctgggccacatttacccacccatactgttggtggcctaagtgcccttgggcagtacagagtaagagccttgtatatggctggtgccttttcacttcacttacacatatgcgcattgaattaacatacaggagtgttcatttgctggagtgtttatgagagtgaaaactgtaaacaccctcagggagagagagaacacctgcataacgacaggcattaaaaataatgttgaagaaggcaaatgtcatggaaaatgtccataatatcaaatatgcacttccatagaaactaaattaaatttatgatgtttatctgtttccatgtaataatgcacaatggagcttcaaatacggcaggaaataaaaagtcatgggggcagagactctgaataacaggattttatttttgaagaagtcctttgcacatggacagtggatgtggtgtgtggtgtgtgacaggggagttgcttcagggacttttaaaaatttagctattttcccaatcagacagtgtctagcaaccttccccacttctttaccttccttctcaaaagagagatgccaggagggttgcaacaaatgtaccatttatttttcctttggtcattgttgcttccataatgagaaaatgcaacatgctattttaaaaaagaaagatctagagtataaatgatgattaagtcaacacaaatacaaatacctcacaataattaaacctagatactaggtcttaggttattggaaaaaaaaaaaggtcatgattgactgattatttgatctcaccagtacatatctggccctcaactaatatagtactgaattcaagtgtctaaatgagaaaagaaagagaacttccaatatgtttgcaagtaccgttaaggaggcgttctgaagaagccaccctaatgaacagaaattgtttttccaaagtctaacatgattccactcttcgtttccatgtcatacatttctacttgcataatatctacaatgtcacctaaaacccaggagctactgttctgcattagaagaggaaacatgattaggggtgcaagcagggaacatgagacaatcgcaataggacattgggcgtgtttgtttttaaaaagagcacgccaaggagatgacgtgtaatctgtatattctaaggtaataaggggaataaaacaatcaatgatattatctttaactttctaaacccactcatctctctaaatactggggaaatagttttccagctatgagtagttctgacaatttaaactcacatctcttcatgtacgagtgtgcagtgatctctaagcagaccatggttatgtaatacaggtgggcaaggtaggacttcctaagtgctgaaacaatctacacaaaagacttccatccctctgtggcctttccaagggcatgttatgtacaacagacacgttgtgtgtctgaataaaaacacctaggtggacaactaggaatgtctatgagagaatgataggcttggtggaaacagagatacgtatctacttgcaagaaacttctctggaaatctagaaatgcttatctaatcctttagaacatagcaaatgtttgacaggtaacaagtagatcaagtaactccatacctttagagaatttccacacgatggtaggtacagggtaaccctcagcagaacaattgaggatgactgctttgccataaatcccgtcctggtcccgtggctgaaccacaaacttgggaggaactgaaaagagagaaatgtcaccagtaattaagactagaccagaaactgagtaaaggtatgattctaagaaactgaatcattttaatgaatattaaaatatgaagactgtttcatacacatgggacaataaaaacactattggcagtttgggacaaattaagggagtaatttcagtgctgaaaaattttctgattcatatcaatgagcttttgtcacaggtaaaagccctttgaactagggaaaactggcctcgagggaggaagtttgactaaatcaaagggatggaatattttgcttttaattgtgttatcaaaaatatacagaaattccctcaatggaaaattgaatcagaatcaccatttaaagaacagatcaggctgggcgcggtggctcatgcctgtaatcccaacactttgggagtccgaggcaagcagatcacctgaggcctggagtttgagaccagtctgaccaacacggagaaaccccatctctactaaaaatacaaaattagctgggtgtggtggcgcatgcctgtaatcctagctactcaggaggcggaggctggagaattgcttggacccgggaagcggaggttgcagtgagctgagataatgccattgcactccagcctgggcaacaagagtcaaactccatctcaaaaaaaaaaaaaaaaaaaaaaaagtagatcaaatatatatttgtgcctcaaatagtaattatcaaatataagtattcatcttggatgtgaactggtcaaagtattcgatgttgatttttcctctaccaggagataaagtgagaaataacaggcacctcgtaaaggcaatcgagaatacaatgtgggactgaacttttcccaaaattctggtgagaacacatagtccgttatgccagatgtcagcaccacggtgggccaaagggggactgtggagagtagttgcagtgaagtaccataaaggttttctagtgtgcctataaaaaacaagatattaagtgactgcttatctggtgaatgttgtgaggtgctgtaaagaaccatccctacctaaaacataaacatgatttcacttaaaacatatctccccaaagaaagcatattttttgagataagccattaggattttaatatgtatcacatctcttagaaaaggtagcatctgaaagtattctaatccccgtatctttcccagcagatcagcgattcattacagggtagactttcagtgaggcagtcataaactatgtgagaagagatgaattatctacaccatatagtagatacttagaaattcctggtaaggctaatctcatcagccttgcaagatacagaattcttaattttgagacataaatgtgagcctatgtgttacaggtagataggaactcagctgccacatatgatagactgagaagatggttagggcctaagttagcaaggggcttagaagcttgttacaatgatctgagccaacgtgacgatcgctttggccataaaataacaaaggaggaagggaaaatgtcaagacacaagaagcagccagagatggaattcaccgcagtgtttctggagaaaatattgcttttaattttctagctttactttctgtagaatgatttacacatgaagaagcaccagaaaataatgactaccagcataaagccaagtgttaaacacattggcttggtgtccagcttttctatttcctgttgggcaattttgtgcaaactgtaaaatggctcttggtctcaatttacttatctgaaaattggagatgattatggaactcattttaaggattgttaagatgatcaaataaattaagattagaaaagttctcagaactgtggagatattaactgctgtaagagtgttgattaatttagtaaatgcaggtatgtttagcttttacttttttttttttttttgagatggagtcttactctgttgcctaggtggagtgcagtggcatgttctctgctcactgcaacttccacctcccaggttcaagcaattctctgcctcagcctcctgagtagctgggattacaggtgcctgccatcacgcccaggtaatttttttgtatttttaatagagatggggttttaccatcttggccaggctggtcttgaactcctgatctcgtgatccaccagcctcagcctcccaaagtgctgggattacaggcgtgagccactgcgcacggcctgacatattcttgatgagcaaagttcccaacttgcaaatgaaataaataatttacacagccaatgggtttctgagatattgcttaagtgataagcaatgttacttcatgtagatggtattcggagacaaaatgtatttaagaaaatgaaaatatatttaaaataagataataaggaatgactatctctgagtgaggaaattatctctaagaaatatggtagagattatttagagctaagttttctagtaaaagtgaccaatcaactcaagagcaggtgacaaagttgaagacaccatgccaaaattattctctgcagggtggaaggaaaatctgcagccatccacattctgtgctccatttggctcaagttctgccaagagcaagaaattgctcatcaatggacagggtagaaaatctcttgcattccctctggaagcatgtctaatcataattgatccattactcctcccctcaatttggttctaatccaacgaaatgttccttaaaatctcatcaaagaagtgtatatgagaaacaaccatagaaatacggtaagtataaggtagttacagataaaaacggtccctaaattagtagaataattaccccgtatcattgaaaactgtttctgaccctggtaggagtagccaggggatttcccacgtacacctctttgctcatagattggaattctctcttcagataccccagtgatttacagtcacatgaagacctaagaaagaagcttctgcagtaagtgagcttcttaatttttatagcaaagagaataattaatagctcagatgtttggtctttggctgatataccatgcaacttgagaccaccttgaggaaaatgctatattttactaagtgcatgaataagccaaatcatatacatttcctttaaattttgacagaagactgtcatgaatgtaaatattcaatccctaagtgatttattatcgtgtaccagtgaatacgtaggtccctttcatgaaagtgaacttgtgagttacaataagaactctaagactgggaacatccatgtacttacatcaagaagacctgaggccacacccctcagatctgacaccttaagaatatgcttgggttgagttctgcctggcaaaattagaggtgatggattcctgggaaaagtagtaataagtttctaaacaaatttctttgcctgcccagagcctaatgtgaagacaacaggcatatggtcccctgggggttgtcatcactttgagacagctgcatcaccagctaagattaaaattccagggcaggggagtgtctgaatgaggacccagtgtttaacatgtaactaatgacatcattctcatatgctctaagcatatgagaatgaccattatccctagggacaacaaagttcccaattttttaaagtaagcagcagtttattttttaaaaagtgcagatattttttaaagaaactattaatattcgacctagatactttttttctacaaaatggcagcctaagaaattgtcctaaaagaatcaggagcccccacaaggagtcacttagtaatgaaagtgagcatttcctgagtactcagtgggtttcacgtactcctagttccatcctttgacccctcccagaattgccctcaagacaattcttactttgcttgcttattaaagagaggatcccccactgtggccctctccttcttctcagggtgttgtcttcaatcttctccacatcttactcaacaaacctcctgagctatttcacccactcccatcacgatgattgcctttatcttcccttggtgtgtagagcaccatatccttccatcattagcttatatcacaggtacctctaattcaagtttccaaaatggtacctgttcctgttcaccatccattaaggtcctcaaaaaagaaaaatggaatttcctttcatatcctcttctttcatttctttttatcaggtgctgatgattatttcttgaaaatgtatcctcaaattctctgcatctccactgccacaccccagtcacagtgagtagtctggttatgtgggaaaggggcacagcccctctgtccacccggcttcagcacctctgggaggacagctccacctccacacactttgccaggacactgcactaaggggatgcggccctctctttgctgtctcaggccttctcagaagtcatgagcctttacccaccttactggtgcaaccttgacatgtgaaaaacaattgtccatcactgagggacaggagtcagggtataaattctctgcctctgcctcagtttcctccgatccagtggggcaattatgaggcctgctctgtgcctgcgcttctcaaacattagagggcatcagaatcacctgaagagctgattaaaccacacattgctaaaccttgtctccagtgattctgactcagtacatctggggtggaatccaatattttgcctttctaatgagctcccaggtgatgctgaggctgctggtacagagaccacacttcaagaaccactgttctacgtgattccttagaaggctcccagtaggaatgagctccagttgcccatagcagcaaccagctcattaaagcaacttttactgattttcttttctccctttctaatctcattctttccattctgggatccaggaatgacatcccaaataaataacctgccagccaattctgtgcctcacactctactttcaagggaacccaacctaggacaaggcccatattgcctcttatttagatttctcagccccctaactggtctacctgccacgaactgtcccacttgaattcattcttcactcagggacctaaaggatctaagacacaaattggatgatgtgacttccttgcttaaaagcatcgcatattcccatggccctttggtataatccagactcttgggatattttaaaggatttttatgacttgagcccttggtctccagttgcattctgtgacattctcctcttgcaggctttgccccaactattctaaaaccccatctattatccagtccccaagaccattcttgctgctgggtcttcacacaggcttcttcatgtctgtttaataagttcccattcaccatttgcatcttagcttagcactcactcagtcaggcacatttgtttctgatgctgtggataagattaagtgcttctctgaggccttaattacttaccatagcctttattacgctcatctggtattgctgtttaacagtctgtgtcccataccaggctgtgcatgctatgagaacaagaaccattcctttctcacaggccatggcatgcccagcgcacagcacagatctgcagtacagaaagcactctgcaactatgcgttgaaaggacacatgaatcaatgaatgttattacttcagttttatagactagggaaacggagcatggctaagttaataacgcagatcagggtgacccccaaagcctgaggtctttgagaagagtggacccaatggaagtgccatctgagggacagcagaagacagcctcataggaggactctggccaagaagatacagagcctgagatggaaggatgtgaagcctttgggactgttgccgtttgggccaaaacttatgacagaacaaaaagaccaccagtactctatattgtctgggtgtataattccccaaggttgttggtttccttttttaaagatgatatttagatttccttttattagtataacacattatttagtatattgtggtgagccggcttgccaatatagtttgttttccaatagatcatgatatggtttggtagtgtccccacccaaatctcatcttgaattgtagctcccacaattcccacctattgtgggagggatccagtgggaagtaatttaaccacggggggcggatctttcccatgctgttctcgtgatagtgaatgagtctcatgagatctgatgattttataaaggggatttcccctgcacaagctctctcttgcctgccaccatgtaagacatgcctttcacctcccagccacctgtggaactgtgagtccattaatcctctttttctttataaattagccagtcttgggtatgtctttatcagcagcataaaaatggactaatacagagcggtttttctggtagggaggaagagtaattaaagagatgaataggttcaactacataattacatcacatctccaagatgcaatatggctaaacttgccaaacacttctctgaatcataattacgtgcacataaccagcactcctgtctccccaaaaagaacaatttgatatatattccaaaataccaaaatcttgtcatgggatccacataggctgagagtatctgaagtttcaaataggtttctttgaggaagtttactcctggtgttgcctaaaatgaaggttgtttaaaacacagaggtctttggcttgatctgcttattttgtgtgtgttggtggggggtggattacttctgttgtttcatttttaaagaaataatactatggttataataagacaggcatttttctagttttaaatgtagtccagcgttttatgtttggaagccatggcttctaagttgctatatatttccaaagaatgaatttaggtttccctagctgtaaacctgggcagaaattcagttttaatgaaagccatttggtggaggtgggagggggtgcatggataaataccaccattctctacttggtgacatttagttgagatgggacttggccaaagtctaggtaagatttaatttacgacactgacaattaaacctattgctttcccatcattctgagaatagatggcctggcctctgcttatatctctgccttacactttctgtcctctcttacttaataggaggcaccttgggcctcttgctgggctgtgaacacacaaaactcactccacactcagtcttcagacttgttggtctctctgcttggaactcgcttcctacaattccctgggacgtacgccttcacttcagtcaagtctctgctcaaagatctctccagaaagccttcccctgcccagcctacctaaaatactattttcatccccatctttctcaatccacgtacaacatgtttatttttcatagtccttgtagataactgacattgtttgttcattatctcttcccttcactagactttgaaccttaatgggcagagacttggtgtctttattttaatcaccatggtatcctcggcactcataacagcacctattataaaacaaatatttaagaaatattttgtgtaagaatgaatgaatgaagtaaaatcatagcatgagaattctatcaaaaattggatcaacagatggcaataaaatagcaaccttctatgattttcatttttcctgtcaactgacagtcaactattttagccaatgtgcttgtttctctatgtggcagttcaccattaaaagccagaaaccattgacccatcagaagatataaaaaagtgtgagaaaacggccctcctttggaatcacagataggaactgttgtgttggtgctttcctgtgagtggtctagagaccacaacaggaagcaaagggcaggagtgctctttcatgaagcctaatgcgttatttctaataccttaatcaatgccaaggtcactccactgagcaggatatcagggaaaccatcagtccactgtcataagagctatgagatttggctcttattggctcatacataacagctaagagatttttgcttttggggtgttgtttttgttttcttatattttcttcaagacaacagctaatttattttagatcaagtctttacaaatcttcccactaacccaggctatcaaacaatgtgctaagctttacaatgaccccaggtcaaacttttcttatgcagcttcctcacgtcactcagccttcatagaagagagttagggccttgccctgtatcaagcttgtacttaagggaatgtggtggctggtttggttttctctatccatactatttaaacgttctccatattagcaacgaggttgtttcactttaccatttgtgtgttcactggagtagcatttttcattgccctcaagaacttttcctttgtgtttacaatgtggcaaacagtttggcataggaagcccagcttccggcctctcttggctttcaaatgccttcctcactgaatgcaatcatttctagcttttgatttaaagtgagagatgtgcaatgaatgattcctcctctcactgaaacaccggagactgttgtggggccattcattggcctaatttcaatattgttatgtcttaggaagtagggaagctgagaaatggtcaatattgttgtcttaggaaatagggaagctgagaaatggagactgggaaatggttggttagtagagtggtcagaacacacacaacatttatcgattaagtttgccatctcatatggctactgaacaattataatagtaacattataatagtaacaccagagattactgattaccaatcaccataacagacataataataatgataaagtttcaaatgttgcaagaattaccaaaatgtgacatacagacacgaagtgggcacacactgttggaaaaaatggtccccatagacttgctcgatgcaggattgccacaaaccttcaacttgtaaaaaatgcgatatctgggaagcacaataaagcaaagtgtggccgggcatggtggctcactcctgtaatctcggcactttgggaggccaagtggggtgcatcacctgaggccaggagttcgagaccagcctggccaacgtggtgaaaccttgtctctactaaaaataaaaaaattagcttggcatgttggcacatgcctgtaatccaagctactcaggaagctgaggcaggagaatggtgtgaacccggaaggtagaggttgcagtgagtggagattggcccattgtactgcagcctgggtgacagagcaagatcccgtctcaaaaaaaaaaaaaaaaaaaggaagaaaagaaaagtgcagaagctctttagtttaattagatcccatttgtcaattctggcttttgtttccattgcttttggtgttttagacatgaaatccttgcccatgcctatgtcctaaatggtaatgcctaggttttcttctagggtttttatggttttaggtctaaggtttaagtctttaatccatcttgaattaattttttgtataaggtgtaaggaagggatccagtttcagctttctacatatggctagccagttttcccagcaccatttattaaatagggaatcctttccccattgcttgtttttctcaggtttgtcaaagatcagacagttgtagatatgtggcgttatttctgagggctctgttctgttccattggtctatatctctgttttggtaccagtgccatgctgttttggttactgtagccttgtagtatagtttgaagtcaggtagcatgatgcctccagctttgttcttttggcttaggattgacttggcgacgcgggctctttttttgtgccacatgaactttaaagtagttttttccaattctgtgaagaaagtcattggtagcttgatggggatggcattgaatctataaattaccttgggcagtatggccattttcacaatattgattcttcctacccatgagcatggaatgttcttccatttgtttgtatcctcttttatttcattgagcagcggtttgtagttctccttgaagaggtccttcacatcccttgtaagttggattcctaggtattttattctctttgaagcaattgtgaatgggagttcactcataatttggctctctgtttgtctgttattggtatataagaatgcttgtgatttttgtacattgattttgtatcctgagactttgctgaagttgcttatcagcttaagaagattttgggctgagacgatggggttttctagatatacaatcatgtcatctgcaaacagggacaattggacttcctcttttcctaattgaataccctttatttccttctcctgcctaattgccctggccagaacttccaacactatgttgaataggagtggtgagagagggcatccctgtcttgtgccagttttcaaagggaatgcttccagtttttgcccattcagtatgatattggctgtgggtttgtcatagatagctcttattattttgagatacgtcccatcaatacctaatttattgagagtttttagcatgaagggttgttgaattttgtcaaaggccttttctgcatctattgagataatcatgtgttttttgtctttggttctgttatatgctagattatatttattaatttgcgtatattgaacaagccttgcatcccagggatgaagcccacttgatcatggtggataagctttttgatgtgctgctggattcggtttgccagtattttattgaggatttttgcatcaatgttcatcaaggatattggtctaaaattctcttttttggttgtgtctctgcccagctttggtatcaggatgacgctggcctcataaaatgagttagggaggattccctctttttctattgattggaataatttcagaaggaatggtaccagttcctccttgtacctctggtagaatttggctgtgaatccatctggtcctggattctttttggatctaattaaactaaagagcttctgcacagcaaaagaaactactatcagagtgaacaggcaacctacaaaatgggagaaaattttcgcaacctactcatctgacaaagggctaatatccagaatctacaatgaactcaaacaaatttacaagaaaaaaaaaacaaccccatcaaaaagtaggcaaaggacatgaacagacacttctcaaaagaagacatttatgcagccaaaaaacacatgaaaaaatgctcaccgtcactggccatcagagaaatgcaaatcaaaaccacagtgagataccatctcacaccagttagaatggcaatcgttaaaaagtcaggaaacaacaggtgctggagaggatgtggagaaataggaacacttttacactgttggtgggactgtaaactagttctaccattgtgaaagtcagtgtggcgattcctcagggatctagaactagaaataccatttgacccagccatcccattactgggtatatacccaaaggactataaatcatgctgctataaagacacatgcacacgtatgtttattgaggcactattcacaatagcaaagacttgggaccaacccaaatgtccaacagtgatagactggattaagaaaatgtggcacatatacatcatggaatactatgcagccataaaaaatgatgagttcatgtcctttgtagggacatggatgaaattggaaatcatcattcccagtaaactatcacaagaacaaaaaaccaaacactgcatattcttactcatgggtgggaattgaacaatgagaacacatggacacaggaaggggaacatcacactctggggactgttgtgggatgaggggaggggggagggatagcattaggagatatacctaatgctagatgacgagttgatgggtgcagcacaccagcatggcacatgtatacatatgtaactaacctgcacattgtgcacatataccctaaaacttaaagaataataataaaataaaataaaaaaacacaacaacaacaacaaaaaagaaaagtgtgataaaatcaggtgtgcctgtgtttattgaatgcagtacattgtggatacgctatgctgttgggggtctggattttgttgtcttcctttttagtgtcaaatattgtttatgcacacaattaacttactagtggagaagttttatcttgccaagaatcttcttaggctcttttagggctggtctagagtaacccttatgctggggatagattagtcctactcctagggtgtggcattcctgagattgcggctgaattcccctattctggctagttagaactccagcattcccaagcaatgtgcaacttctgctagcaccctgtgcatgtgaagaacagtattcagctgaaactgcaaaggagccctgtacagatttctagagacctttctttgaatagctccctaatctccagtagcttgtccttcaatacccagtaatcatcttagtatctttcaatttctctctctgttttctccacctgccaagatcactgtgatctatttgggctctgcactctctgtcatgtgcagaaagtaccccaagcagctatctggggtgaatttggaactgacttcatgcactttgttttgttcctgaaagcagttcttatatatattagaccaattttatagttggtttgtagtaggaggataaatgtgttacctgttactctgtgatggtcctattagataatttttgtttttccacttctttgacccaaaacatcccccttccctataattttcaatcatttctgttggtgctacctactggagcttcacaccatggttgttattatactactttgaacgtactactgcactggtacaaagaattctggttgcattcactaactcaaggactttgatcctgtaataatctcctctttatcttgacacatatttttttcctctctactggcttattctcataagcataaagcaggctgtaaagtatccagtcttaaaaataactcctgcccttgccccatgtccatttccaactttgtctccattttactgcctcctgtgatagcaaaattcctaaaaatataaaaatagttgtgttttctgagttcctgcacattgaccttctttcttttctgaagctcctctaatcaagccctcgctgcaatgacaccaggtcataaacaatatccatcaaggtcataaacaatatccatcttcctaaaccagtgaccaactcttggttttcctctttgtctactttcagcaggattcaatactgtttaatattctctttctcgatttatttctgattttgcttctagagtgccacagtccactggattttctcctcctttacaggctgctccttttccctcttcgtctcttctgctgattcctccttctcttattctggggccttaaatgctggagtgccctagtgactgctgggacaggtgcttctcccatatcattgaccattattccccttgtcaataccgttcttcctcatttcttctctgcttctgctaaagacactttcattcaccttgttattaggcaaagcatgattccactaaaggttcttctttatctcatttgcaacattcactccataagcgtgttttatttgctttaccgccaaaatagattgtgaattccactgcttctcatgaccttaacattaacaccttcatccaaggcatttttatcttgtctgaatgtctgaaatagcctgttaactactcttcttgctttctagcccagtccattcttcagacagctactagtgtgacaactaaaaagatcaatcaggccatagtgctgtggtggttaaagtcaacagtgccaactctttaatctagaagaaaatccacacctcaaaatggctgcacgttctaattactcagggggctggaactgagacttggctacatattagaataaacctgtggattttacaaattattgatgcctgggtcccacctccaaagatggttatttaattgacaggagcttcatcctggtcatcaggacctttttagacctccctatgcaatctgaatgtacaacaaagtttgagaaccactaactagtgatttttgggaaaaaagaacaattccccagagatctggaagatggatttacccctaaagattatgatttaattggtgtagattgggaccaaaaaatgcacatcagtgttttcttaagcctcccaggagattctacagaactgtctggattgagaaccacagtcccacatcaccttgtccctgcctgtttctccagtcacactgacctgtttgtgaagcacattttcttcctctaggctgcattatctcactggtgatttaatattaatttaactaaagcttatttaacatatttgaagaacaatcacatggagacatcagtcatatcatgatcagctacattatcccaaatagctaggctcattttcagctcatctgattttgccttggttaaaaacttctggttgccttttctgcaagggcaagttgtacaaaaagcatccccgtacatttttatctgacgtttcagattcctggcctggatccttcagagcagattatatagaaagcaggctgatgtactattttgcccttcacaaacccaagagttaactctgcttataagaaaacgcttgggaaacagatactaggttggctcccttttttatttatctttcaaaatttgggaaaaaatcaagtatcccaattcttccactccaaagtgcaaggtggaaatgagaaaaatgtcatgaggctgctaagtttgtgtctaattgaatatatattttctaaattattcacctggaaattttttttttcagaaatacaaagttagtttcttcctatgacttctaagtctgtgtcacttccttttgctggcaggtagataaaaagtgcatttcttcccagctggcaaggaagaagaggtatcaaggggacaaggagtaaggaatgaagaaggacatgagaatctcctgctcaagaaagagctatctccactctctgggaaattacagaaatcctccccctcctaacaaccactctgggaccacaatctggggaattttaaaatgcaaataatcattgttaatataaatctttaacttcagacagttacttttgcaatgtggatgaatattgtaatggtagattaatgtatagtactcttggagaatcataaacatcacagaatgtctgtgtttgatatacattagagaacactagcagcttatttcatagatgaagagtgtgagccttaatgggaatttggtgacttgaatagaagttcaaaataagactgaagcttacagtttagatgtaatgagattactgccagttttctacaagttagcctaccctattttaatttttttgaataagtactaccatactctgcttaattttaaaacgttgcaatggcgtcccaaaataatgatagatttaatgctaaatagaatagatgggcaaagaaaaccacatttctaaaactaaaacaaacattatgaaaagctatttcatggctctttagaaaaactttgatacatagctttgagacatattttttaaaaaaccatttattgaaataagaaatactaaaaatattatatgaatacaataaagcaaaagctcacggacgttagtcctcaaaactcattggcttagcatacggaagccttatttcatgaattaaatcctatggttcccaccttcttagctattaattatttaaaacatattttaggtaaataaaaccttatcttggagtttaggggaattcatggttgggtttagagtcgtatttttttttttttttttttttttttttagtgagataaaactgaatttctaagttccagttattttcgaaatatttcaagccccatcatcttaaaccattgttaaatcaactctacagatgccacatggctcatgatcctttgctcacctctgacaatcaactggctttggtgctccacagcggcggcctcattccgggctatgcaggtgtaattcccattgtgcatgagcgagagattggaaatcctcaaggagctcgtgaagtcaatattgtcaatggtcaccccaaggctcccagggattggccggccatccttctgccaggtgatcgtgatgggtaagtcccctgagaccacaacacaggggatgaagacccgctgcccaatggagaatcttggaaactcaaagggttgtatgaaaggcggaactgcaagaaaaaagaaagataataacgaactgtgcttattctacatttgcttttcctttaaccctgtatacggcactgaaagggtagtacagacgatcatagatacagcatagaaatacaggaactgtagcaaatttgaaattctgcttctattatttgaatgttctcatcattttaaataaaaaccatggttcaatttgtacttcagcaagttaattttgttcaacaaactttaatttaaaaattatttttgaatgaaaacatttcagactatatctgtagtgtaaatagtgtgaaagagggatttaggtttggttttccttcaaagccttttaaaatgatgtatacaagaggaggtttctttcctactttgcgactatgacactacaattactgttccccttctaattgtttcctgccttgtaaataggcatattctaaacccactgaagaagcagaaattccaattttggctggatgtggtggctcacacctgtaatcccagcactttgggaggccaaggcaggaggaacacttgaggccaggagttcaagactagcctgggcaacataacgggacccccatatctacaacatttttttaaaaaattagccaggtgcgatggtgtgcacctctggtcccagctactgaggaggccaaggcgggaggatcccttgagcccaggagttcgaggctgcagtaagctacgagggcaccagtgcactccagcctgggtgactccagcctgtgtctaaaaaactaaaaaaaaaaaaaaaagtaaaataaatattccaattttattgttaaagttctctgttatgtccaactaataacaaccattaattataaattcttatttcatattagaataactacatctttactttgcatctcttagttttgcacactttacgtgtgtaacttttaattgtgaactggtccgtggcaggttatttgacttgctgatgtattgctaaggaggtcgggttatagccttcagcctggcctgccatggacactgcaagcaaactcagcctggaaagctctttcctgattcagctttgctgagtgatgcctgttttgtccaccttgccttaggaactctcttcctcagtgccctcctagatgatgtcatagggtattaacattctgaaatagttaaaatggagtcagatgaaccacatttgaactctaactgttacttgttagttatgagcaaagtaatatgctctttcatcagccttacggattagttatttattgctttactttgcagatgggaaaagtgatactcaaagatgttaccttgcccttttggtcttagaactagttaactattctcggagggcttaaatcatgtcaatataactaatatcagagcctgtaatgtaagccttttttgtgtttttgcatacattcttggaaagaaaaaggtttatttgtatgcaggggcttggaaatgactaagagtacaaactaagatgattaatcatgtgataatctaatataaaccaattattatattacgagtttttcctaatgaagttattaaagatttctacagtttattcaacaattgtaagtccatttcaactatcagcttaaggaagaggtaagggatccggctgagaaatttgaatagaaaaccattcattcatttatttgttcattcaatcaagtcatgtttattgagcacctgggatgtgtgtggcagcagtgaacgtgctgggcacacagcaatgagcataacccatcagcctctgccagtggagcttccatatatagccataggccgcagacagcaaggaagtgcagccatggcgcttctcttatttcgtattatcactatgacggctgtctgctttcaaaagcagttgggagctagaactcaaaattgcaagtacagccagaggtcgaagaagtaggtagctcaagttaggttttaccagggaaattaatttttttaaatggtcaaaggtaccgacaagcatactcaatgtcaatcctcctgtggattctccatgtaaagttagatctttgggattgaaaagggctgatctgatgctaagagataaaggtctcaggatgagattctatccagtgctggtggagagaatcgggtcagactgaggtatgaacgttctcagttggaatgtgctggagaaaatgtcatgttgtaccaaaggtgcttgtatttctttaaatctcttgcccccaagtggcataaatgctcactatatatgtaaatattattaatactaaattgctatgctttattaaagaaaataattacatttcctcccctttgatttcctggacacaaaaacctggttgtcagcatactcagacaaaccttggcttggtgcttactgtctgaattacagacaatttttctaagataagaactttggagccaggctactttggtttaagttcagctatgctacttactacagttacttaacccctctcagggtctcagtttccttatttataaaatagagtgctgccttgagctctgaatgagttaacacagtaattctcaaacttagttgtgtatctgaatcagtttcttagcatttgttctatttcacaagcctttaagatgaggaaaaaacaggtaagttgaaaggttactgggctaattttctctatcagttacaacagggagaaggaatacgtgaggatttactttctccaaatcaagaaagaaaggtaagacatagcatattttttaatctagctatttaataagaaggccgggtgtggtggctcacgcctgtaatcccaacactttgggaggcccaggtgggcaaatcaccagaggtcaggagttcgtgagcagcctggccaacatggaaaaaccttgtttctactaaaaataaaaaaaaaaaattagccaggcatggtggcgtgcacctatagtcccagctactagggaggctgaggcaggagaattgcttgaacccgggaggctgaggttgcagtgagccaaggtcatgtcactgcactccagcatgggagacagagcgaaactccgtctcaaaaaaaaaaaaggaaaacatagagtgtaggttgtaaataattgtaaagtattagaatgtccctttagagcataagagagttatagaatacaggaaatatatgcacatacaaattttcaagaacagaagtaagaggtagctatagaagaatcagcattaaaaccaaaacgaaaaccaaaaccctgtgttttctataattccaaaatatttgcaattcatcagtgtatggtatttaaggaatatttttatcattactttagtacaaagcaacagggctgaaaatcaagaagtacacttccaaagcactgaaaaaccagtgtcagaaagctaatgcactaaatctcatacacatcactccaaggataatcccttgctttgaacatcttattttaaatcattacaacactgtcagttatctgatatcttggcctaaatcagattctgggagttcaggcatattgaagagggcttagtaagaagccacaattggcaagcaaaaggaggagggtgagaaactaaaagtaaattataaagaacagacacaaaaacgcaacacacacagtagttggatgacattttgtttgggagcacattgcccttagtagtcagcatttttgtaattaatacaaaatcgtaatacttaattagcattctgaattataagtcacggttaacatattaaataaaaagatacatttaaaatattttaaaacatatctaccaaaaaaaagcctttccaaaatggttaaaataaatattaaagaaaagtttagtcataaggaaaagcgttttcccagaagaatgtcaaaattaggtttgctatgtgttgctttgcttgccacattatgtaaggacacattaggtcagtatgcacattacatcattgttaatgtaaattaaatcacaagacctatttgtcaatcatgtcaattctttcttcactgcttaagttgccttgcttgcatcagctgtgagttgcaagtctgctgcatacaaatgcataaaatttttaaagcgtcttaagccttatattttatattcataagacataagatcgatggcacaaagtaactccagtgattagaaaactcttctcatgattttgggaaagctgaacctcctatttgagacacactgattacctgattcatgatatcacctaaataaggtaaattatctgaatcttgctgacagtaaaagcttgtatatcataggagcagaaatcctgaatatgacacacaccgcttttgacataccctttctacaagaagtacgtaaatatctgataaaggtcatttattaccaggcttgtgtatttcactctacataatggcgggggtccttttcctaggcagctcagagccattgaatactgccaaatgtcaattttgactcttactctatctaaacccttaacaagaatattagatcagactgatatatttctgtcttgtctcttaaaaattaattgtatattcttcttcatggagggaaatgctttgatttctcctagagaagaggcgtataagactttgataaaatcatgggtggggtgctcgtcaattctgggtgattagcagtgttatcttgatccagtttatttagctctgcgattctatctcttcatgtgtaacgaggtgataatgaaacacagttcattatcagcttgcattgaaatagacagcaagtagctcttctgcgcagccacagggctatttactgtccagttcagtgcaaggcgtgactccgaaatgatgaggctgtgagcaggtgggagtttctagtccggggtataccttcaagatctcctcacccataagtctggttatctggtcaattctgctacttaacaacatcgtttagctaaattttagattactgacccagtctgatacagttctccacaatgtacatacaacacaagtaagcggttcctctactcactcttgttcaaaactcttgtatggaatttatcacattgatgactcaagtgagtacagtgatttatggacgtgcccattttcttaagtagagtgacccaggagggcaggagatctatcaagtttatcttttttatttcccacaactagtgggataaatagtgtcctgttctttttttttcttttctttctttttcttttttaaacggagttttcactcttgttgcctaggctggagttcagtggcatgatctcgcctcactgcaacctccacctcccgggctcaagtgattctcctgcctcagcctcccaagtagctgggattacaggcacacgccactaggcttggctaattttttttgtatttttagtagagacggggtttcaccatgttggccaggctggtctcgaactcctgacctcatgtgatccacctgccttggcctcccaaagtgctgggattataggcgtgagccaccgagcctggatgtcttgttcattttgattgaataatgttttttagaaaaaaactttcagaggtgatgatgaacatatgtttacactctgcactttagacaatcctgaagtcattaagaatgacttagtttactgagaatgatgatttccaatttcatccatgtccctacaaaggacatgaactcatcattttttatggctgtatagtattccatggtgtatatgtgccacattttcttaatccagtctatcattgtcgcaaggacaaaaaaccaaacaccgcatgttctcactcatagatgggaattgaacaatgagaacacatggacacagcaaggggaacatcacattctgggtactgttgtggggtggggggaggggggacggatagcattaggagatatacctaatgctaaatgacaagttaatgggtgcagcacaccagcatggcacatgtatacatgtgtaactaacgtgtacattgtgcacatgtaccctaaaacttaaagtataattaaaaaaaaaaaaaagaatgacttagaaaagaggagcaggcagacacttccaggacttaataatgacgacatggcagggacaagagtgaagctcctcttcatagtcttattagcctaggggccgaggacttctaactactgtgccaactctcccctctgctggcagggccagttggggagcttgagtcaatatctggccttgtttatttaggtacggtcctcgcgccaactctgaattgctatgtgagtttgtttccctgagatcggtgacttccaaccagcagcagccagagatgcacctagcttaccgtgacttaggctgctggtcccgtgacctgcacctgctttagcaggaagggcaggaggccaagatgcagagacatatgatgagggagtgataaggatattgctggagccggtgggtgctaaaagaaaccagaggctgcgtgggtcacatcaacttagattccattagtttcccttcttagcctctcactccaagctccccgcggggttcaatatgagctgatattaactgacattgacctaggcgaaaaaggcaagagtgagccagtggggaattctttggccctgccttctgggtgggaaggacagggaaggacaaggcattgtccttgcagtgtggtggagatgacttttaggatctatctttaaggtttccttaaagaactgtgtcttgggcatatttgtaatagcccaaatcatacaaaactttaaaaaatgtttcaagtatctgtttttctctagacatagatttgaaataccacatttgaatttctgtggatgaatgaagtaggagttttgagtatattttgataaatttacatcttttgaattatttaaggtgtactcaaatgagaagtatacctcctttaggggaggagttataagtaaaaacagcagaccaaagttttctctggccacattctccattctaagaaaacatgttccccatggacagaaaaaaatagctggacccaatcatccatgtcttccttagtttcagaaagtgtcaaggcactgaacctgctgtgacttggagaaaacaaacaagaaaggctaaataatgttcgtgtgtgcatgtgtgtgtgtgtgtatgtgtgtgtgacattctctttatccattcatctaccaatggacacttaagttgtttccatgtcttggctgtcgtggatagtgctgccatgaacgtgggatcacaggtacccccttcacagagtgatttcatttcctctggatatacacccagtagtggaattactggattatataaatttttttaggaaacttcctattgtttcctatcatgtctacactaatttacatccccaccaacactgtacggggttccattttctccacacagccttgccaacacttgttatcttttgactttttgaccacagccatactaacaactaaatcatgcaggccaaatttcacaattctcactcagagtgggcaccaagagattaaaggtggtaaaaataccccatggaatactttgcagccatagaaaggaatgagatcatgtcctttgcagggacatggatggagctggaagccattatcttccacaaactaatgcaggaacagaaaaccaaacactgcatgttctcacttataagcgggagttgaacaatgagaactcatggacacagggagaggaagaaagcatgtgaaagcatgggtaaggggagggaaagcatcaggaaaaatagctaatgcatgctgggcttaatacctaggtgatgggttgagaggtgcagcataccaccatggcacacatttacctatgtgacaaacttgtacatcctgcacatgtaccttggaacttaaaattaaatgaaataaaatagaagaacattatgtccgctatagttactgatgtgataaaaatctttcctcatattatattgtaattttaaacagtggattgaattattttatttcctggtattatttcataatgcatattgtttttcctatatagaattattctttattttacacaataaagattctaatatggccattgcagtgttagctttgttccattattagaattgtatcacacaatttttttatagtaaatatgatttgaaattatttctaagttaattaaatgggccagtaatatattctttaaaataataaattttgtcactgtgttagtccattttcatgctgtggataaagacatatccaagactgggcaatttacaaaagaaagagtttaattggacttacaggtccacgtggctgggggagcctcacaatcatggcagaaagcaaggagaagcaagtcccaccttacatggatggcatcaggcaaagagaatgaggaagacgcaaaagcggaaatccctgataaaaccatcagatctcataagacttattcactaccacgagaacagtatgaggaaactgcccccatgattcaattatctcccaccagatccctcccacaacacgtgggaattatgggagtaaaattcaagatgagatttgggtggagacacagccaaaccctatcagtcaccatctctgttcatttatgtgtatttactttaaatgtctaaaagatagataagtaccctacaagagtttatgagagttcatagatcccatggcaaaagttaatgagggtggatatcacattcatttgaagaatcatactacacattacaaaattgaattatgagattgaaaaccatgaataaatagttcaacaattcagatggaaaggaatgtctcttactaatcatacgctaatggaaccattgttcctcagtgtcctgacctggccttgttcttccttctctctccctgatggtctcagcacctcctttgccccagctgtcagctcaatgctgttgactcctaatctaaattttcaaacaaaaactccttctcaagattcatgcctgcttgttcagtagtatgtcaatatcttcatcttgatgtctcagaagtatctcaaatcccaaaccaaacatagcaagtttccccttaatctaagcttcttcaattctctgttcttagtagtgatagcaaaatattttggttgcaagaagcttcgaataataaaagcgttcctagttgtgcatttctttttgtgtccagctgctgagagtgtgctgctatgtattgtctactccaattctcaacatgtcttttgtgtggtttctctttttccaaacacagtactatcacctttttaattacaactctttcaattgtgtcctaactggtcattcttttttttttttttttcatctttctgcactgtgatataccttacccacctcaaccagattaatgtttctaaaacattgctgcgagcatttacctctgctccaacacctttaggattcagcaggatgtgctaactctccgaggcctggtcctctctgtgcagatgcagaccttcgcttactgggagtatcctttgtgtcagccataggggctcttacatgtgagcaactgcacctgacccacctctgtccccacaccctgtccgagccccattctcactctgatcatcttataatggcaaaactacactcaattgtttctgcttttggaaaccgtttcaggcgctagacccttttgagattcaactcagcttttcttggacattcttttttggctcctcaagacttctcagcctaccctatgcccagaattagataaatgtccacttcctctgctcctaaaacacatactgcatatttctctgatggtattgtgttgatgtctgcatttgtcttctttgtctccctgctgttctcctgcgccaggtgtcatggctgctgttttggaccttctgctgcccctcgcccaggacatttgctgcttcctgtcgtgtgttgccatcatttgtctgtgggttctcccacagaccccaacaccttgctggcagtgaccatcctattattacttgatctcattaacagcagacgcacaagtattacctgaatacatttttaaaaaacatcttagcactcacaaaactaaagagattttttgagttgaaacttgttctgatgacaaaggtccaattgagctatgaactacaacacaatacactatggtacactgtaatatttctcatttctaatttgaaatattggactcatgtcattatagaaagcgggagcaatttttttttttttggagacagattcttgtttcccatcttgttgcccaggctggagtgcagtggcatgatctcggctcatggcaacctccgcctcccaggttcaatcaattctcctgcctcagactcccgagtagctggtactacaggtgcccgccattacacctggctaatttttgtatttttggtagagacagggtttcaccatgttagccaggctggtctcaaactcctgacctcagttgatttacccgcctcggcctcccaaagtgctgggattacaggcgtgagccaccacgcccggccagtgggcgcaaatgaatgaaaaaatgtgtttaggaaaaggtgtttaagacccacatgtatagccatttgacatctacgtaagtgggaggagttgcactgaccagattcctttcaagaaaggacatgttaccaccaattcatggggtgatgtcatctggaagttattggccacctcggagattgtctcagctgcagaggcccacttcacccaaggacaggctcttttttggagtgtcctcaatctagtgactgattgaggagcaattctgcccaaactcaggacaaccctgaaggactgttcttgctccagagctcactgtcattggcctgcatcccagctcactctttcttcgcccagtccttcttcctgtccttccctcctcggttgttgatcataaggcactccttgataaacactcttcacactagcatccatctcagagtcagcttcccgaaaaacccaaccacaatggtttgtttcatctacagcaaaaatgcatgcaccattaataacaaaaccaggtctgtgtgtgacacactctccatatacttcaaccatccattcacattactttaactcatctgggactgggactagaagagaattagtgctgagttctctttcaaatatacccctctatacatgatgaaaagtatcttgttattttccctcagaacaaggaaaagatagaagaagaataaaaaaagaagcaagggaaaacgtttaaaaggtgaattttaaaattgttgctcactaacttaaaaaaaatgctgtgtttgttttgttgtttttgctcattcagctggcccaagtttagctagtgttctgagcaaaaattcagtttttctctctaataattggaatatatcaggaataagagtagctaacttttctacaatgattttaaacaaagtagttcttctataggatgcttattttagactgctagactgtgaaaagaggtaaagagtcataaatataacaacgaagtaagggggctgggtgcagtggctcacgcctgtaatcccagcactttgggaggctgaggtgggcggatcatctgaggtcaggagtttgaggccagcctggccaacatagtgaaaccccatctctgctaaaaatacaaaaattagctgggcatggtggctcacccctgtaatcccagttacttgggaggctgaggtagagaattgcttgaacccaggaagcagagattgcagtgagccgatattgtgccattacactccagcctgggcaacaagagtgaaactctgtctcaaaaaaaaaaaaaaaaaaaaaaaaaaaagaaaaaaaaaagagagagagagaaaaggaaataaaaggaaggcaaataacttttttcccaaaaattgtttaaaattatcaagtaagtccatgggaggaaaaaaataattaaaatgttttaggaacaagaaaaagatatcccaaggcataaagtagaattataataaagagaaacacaaaagatgcaagttggatacaataaagggaaaaaataaactacttgaaatttgggggcgtaaaagagtaaaacaaactctgagaagcatggcagtgtctccttccaatgcacttccaaaaaaaatggatgccctgcaatattgtcaaccagatgcctaaaggggaatgtggtggaaagaactggataatttcttggggccatttgagtcttcaatcatatgaaacatctcttgaaagttatttttatggagtgtattgtaaagccataatcatattatgttgaaatagtttctttaaaagattaaaacgaccaagaacttaaaaacttatgataatatctatatgtaaacaattagagtcaccatggtctgagcaggatgacaggttatgtttcccctggttgagagcaataataccttcatacagaagactgtaataaaactgagttacttttctgcatttttaatatgaaaagaaaagccatttgaatcatcaaggcatcaagaaaatgaaacatatctcatgttttacttatttagttagagaaaagtgtcatctagatgaggtacaattattttatttttgtttatatggacttctgatggaagcaaagccatgtgaccccaaccagaggtgacgacaaccaggcttaataacaaaagtaaacaagattcataaaatcactggtattcattttaaaacttggcttatttttccaattagtttttttacaaggattgttagtaatagattatttgcttgagaagtatttttcatgacgttggcttagaaaaggtcatagctctttagaagcttggttaataataactgacttgaagaggcttttttttaagtaaagtgctgaaatatgttacagtgagacaagggtataaaaaggtagtcaatatatttcacagaactaagactgcctctgacagcaccatcatggtatcttggtagatggagaggagaagaaaacatgggtcatttaataaatattgggataactgactcgatatagatagaaaatatattggaccccagctttactatatctgtgaagctcagtgtgggttgaaggcctaaatgcaaacagcaaaaatagagacatagaacaaatacagaaaaaaataggaatgcatcttcatgagctcataaatttcttaaacaaggtccaaatgaagacaaaggcaaagttaagagagaaaagacagccttggaaaagatattcacaatcatttctaagtaataagagattcatatttatactaaagaactacagcaaagcaggaagaagtagcaggagtgatagcaaatgcacaaagcaatgcatagatgaaatcctcagacatctcctgagagtataaaaagacattcaagcacaatagtaatgaaaagaaaacaaattaaaacaaagagctcctttacatcaatcagctttgtcacaaatagaaacacaggtaccaggatgcggggaactgggacctctaatgcatagctggtggtaaagtaaactggtataggaattttggagagtggctatgcaattattagtgaagttaaattctatgacctaacaattctactactggccctctagtaatattaatactacacatggacacatttataagatacccatggtagtatttgtacagagtcaaagggctgggtggggggcaaactaagcattcacttttgtgctgttattgtatatatttacatgcatgtctaaataaggatgccagaaaattaatttaaaataaatatattaagtacacataagtctgtgcctatgagacagggacaaacgataccagaattggtggatggttgaaaaaaggggggacaagttaaaataaaacaaaataaggatcttgcatggacagatgataatggtgtggtgtcagccaaaagttgacaaaacaaaaacaaaattcaccattgggatttttgttcatgagtcccaaaccatggctcaacagtgggacatgggctgcaactaggcgttcttgtcttcaggacagaggtggcactctcattcccctcttttattcattagaaaatgcccagagggctatgtttcattgagacaaaatagacacatcagtgtgtccttcaaaggaaaggagctgctgaacttcgttgcatacaaagtatttaaacaaatggggacgctagagatggttagccaggaagacaaagcttagtcttttgcacgactgggagctttatgtggagaaacggggaactatttagtgttgctctagagggaatattcgaaccagaaagaagagaagagctagagaaggcatatttgtatgtatctctatttgtatgtatgtcagacagaggaagaactgtctgacaatcacagccatgtagaaacagaaagggctgagagcttagtgaaccactgcacagatcgtgcaggaagagtctagaaaaatgtggggtacagtccaggggcatgttgaatatcacatgggaggctggtctagatgaacttcaagctgatttatagccctaagattctaagagtctataattgtatcatgcatctatatatctgtaaccacatatatatgtacttatatataatatacatatataactatatgtatatttatatttgtgttttatatttatatatctttatatttaaaatataatgcatataaatgttatataggtgtatgaagtacacaattttattgaatttatatatttaaacaatttacatgtgttttgagtcaatgcatataaaagatcctaccgcatggttctgaataattgagagttgttatttctgacttaaaatgtcattatcacggcattatttttagcactgccaaagagtttttccctgtggtgtgtgcacaaacgtgtgtgtatttgcagattaattatgaattagacagcaaaagtgttagtaatttgcttggcattcttttccctttcttatctctacataattctctccttctctaagtttcccatgttcagcaagtgcaacaagtattataaaacataatttatcttgcaattttaactaaataaaagaattgtattcttatatgttgattttgtatcctgcaactttactgaattggtttattacttctaatcctttttggtagtgtcttagggttttctatatatatggtcatgtcatttgcaaacaagttaatttcttcctttccaatttgaattatctgaatgccttgtatttctttctcttgcctaattgctttggctgagacttccagtgacatgttgaatggaagtggcaagagtgtgcatctttttttttttgttcagaatcttaaggaaaagcttccaacttgtctcgagtacaatgttagctgtaggtttgtcatgtatggcctttattatgttgaggaacattccttctgtatctaaattgttgagaatatttatcatgaaaggatgttaaattttgtcaagtatttttctacacctattgaaataatcatatgataaagctacaaggcaaaaatcagtagtgtttgtatacactaatagtgaactatctgaaaaaaattaaagaaaacaatctcatttacaatagctacaaaaactaaaatacttatgaataaattaaccaaggaggtgaaagatctctacagtgataagtataaaacattggtgaaagaagttgagaaagacagaaataaatggaaacataacttgtgttcatggatgagaagaattcatgttgttaaaatgcccatcttacctgaagtgacctacagagtcaatgtactttctaccaaaataccaatgacatttttcacagaaatagaaaaaaaaatcctaaaattccaatataaccaaaaaagagccagaatagccaaaacaatcttgaggaaaaagaacaaagctagaggcatcacaccacatgacttcaaaatatactactgagctataataaccaaacagcattgtacttccataaaatcatagaccaatggaccagaatggtaaatccacacatttacagcaaactgatttttaacaaaggagccaagagcacacaatggggtcttttcagtaaatggtgttggggaaactagatacccacaagcagaaaaatggaattagatcattaactttaatttatgatgtctctaatgccatatacacaattaaactcaaactggatttaagacttaaatggaagggcctaaactatgacactactaggagaaaacatagggaaaaatctcctaacattgctctgggcagtgacttttggttattaccccaaaagcatggacaacaaacgcaaaaatagaacaatgggattacatcaaactaaaaaaacttctgcacagcaaaggaatcaatcaccagagtgaatgaagtgacaacctatatatagaaggaaagaatatatttgcaaaccgtacatctgataaaaggttactatccaaaatatataaaggattcaaacaatgcaatagcaagaaaacaacctgatttgaaaataggcaaattgaatgaatattaaaaaatgggcaatgaacctgaataaacatttctcaaaagaagacatacatggctaacaggtatataaaaaatgctcaacatcgctaattatcagggaaatgcaaactaaaaccaaaatgaggttatcatctcacacatgttagaatggctattataaaaaacatgaaaaaaacaagcatcggtgaacatgtggagaaaagagaagctttgtactgtattgataggaatgcaagttattatactcactatagaaaatagtatggaggttcctcaaaacattaaaaatagaaccaccatattttctagcaatcccattactgggtatacatgaaaaggatatgaaatcagtgtgttgaagagatatctacacttccatgttcattgtggcattgtttacaatagccaagatatggattcaagtggctaaatggtcaccagcagatgaatggattaaaaaatatatggtatacatacacaatggttgccaaaaaaagggacaagttaaaataaaacaactgtaatccctgcactttgggaggccgaggcaggcagatcacgaggtcaagagattgagaccatcctggtcaatatggcgaaggcttgtctccactaaaaatacaaaaattagctgggcatagtggtgcacgcctgtagtcccagctacttgggaggctgaggcaggagaatcacttgaacccaggaggcagaggatgcagtgagccgagatcgcgccactgcactccagcctggccacagagtgagactccgtctctaaataaataaataaataaataaataaataaataaataaataaataataaaaataaaaaataaaataaggaccttcagccttaagactattcaaccttaagaaagagtgagctgtagtcctttgtgacaatatggatgaacctggagaacattatattaagtgaaataagccaggcacataaaggcaaataccacatcatctaactcatatatgcaatctaaaaaggttgatcttatagaagtagaaaggagaatggtggttcccaagggctggagttactggggaggtgtgtgtcaaaggacacaaaatttcaggaggaaaagtccaagagatctattgtacaacatggtgactgtagctaataatttattgtattcttgaaaaatgtttacagtgaatgtaaagtgttcttaccacaaacatgataactatgtgagacaacctatatgttatttgatcagatttagtcattccacaatggatatatatttcaaaacattatactatacacaggaaatacgtatcactttatttaaaatgtaaatacatattattttatttacaatgtaaaaaatcatgtatatacatttaaaatcaatatgtaatgtaatatatgcaatacataacatatatttatgcatatatttatatatatcaaaatatatttattatattatatgcatatatttatatataataaattatatatttattatattatatgcatatatttatatataataaattatgcatatatttatatatgtattatataataaatatatattatacatatatatatatatagcattctttcataatgaaaccaatcttacacatagtctttttttccctccaattagggtaaagtaatttgagatatcgcttataaaacacttaataaaatgccatattttaaagaaaggtgtctgcttcgatttctagaatagaggaattttaagtcattccacctccaggacaaacctgtctgaaggaacccatagaagctgagtcctgcactcaattttgatatcctacctctcttctgcagacacttgagagcataaacccccagggtagctgagccaatgcatccatttaagtatattgaagcatgagtgctttcttgcgtcatttaaaaagggaggacagtgaaagttcccacttcattagctttcttttctcacattagggtattaaattaaaaagagagtataaattctcattttaaataataaattaacataaaaggattatacatttaatacgttaccattctatttttccccaggtctatatttctcgtgtattattcataatagaagctctgcaattcccaagtcgttgttgaaaaataaatatgaaaatatgtggatgactgcagtgtatggccacacacaaaagaccccagcaaactggagcttaagttaaccattgctccactttaatgaggaactaaaatggaaaaataaactcaaaatgctgtcctttccataaacaatattgcaagtaactccagtatctagagagatagtaggagaaagtggaagaaagtgacagattaagaatgaaagacctttccttgccaacagagttgggtttggaattcagtggaagctgatagtgccaaggttggaacagctaatgagcaaatgtctgaaagcaggagtggggaaactgccaaggctgtttctgtgcacaaagctgtccctccacctaggcgagatgacatttgttcccagcctttgaagaatgatgtcattagaagacggcatccccggccgctcacctcgagtggaaggcgagcagacacactcacagcattatttttaactcagcattcatttccccacttgcaccaacagcaatacagcaagacattacggtgacagacgagacacagcacaggacaaaaagctgcagggaagcaggattttaacgtcaaaatgtgcagaacagtgtccctgttgggctacagtacacaaagtaccaccaacacaagagctgaaaaccctggcagtgacatctaattctcccttcaatttgaaggaggacatggtaaaaaaatgctggtacattaaaatgagaaatcgccacaaatatagaaatggaatgaaatatgtaaaagcgaatgtttctgttgttctctgcattcctagcatggccatttcatctcactattggcaaacattcacttttaaaaatcctcataaaatatgactctgaaagcttggtgcttcttagacatttatttacctgtgattttaactacccttctctatgaattttagtttgctttcctgtctatttttttaaatccccatggtctgaagccagaatggtgatccacaggcacttaagaccaaccccgccatccaaaggctttcgccaagacactcaggtgccacatcgctcctctcagcctctccatctcccaagcaagagcttctggagtcctttcttgttctgacctgccctctttcaccaaatccattctctccttttcctctctccaatttaacaaatgctatctctcttaaattagtccctcaatatcttttgccctacattttaacatgttgtctgtcttgactttttaaatagctttattcctgggttctttgtattcatttctccccactcctaccctggcttcccgctgcaatacgaattattcttctgagagtcaccacgggttgtgttggaatcaaaacatctgcgtttgagtcttgaatgtattactgggtgactgtgcgcagcctcatctctcttctattctttccctgattatgctttatctacgttacagagtcactgtattaattaaggtgacacagatgaaagtgttttgtaaactataaagttttatataaatataaataaaaggtgacatttttatccagcagccaattaactttcctggcagtgttgatccccagcaattagaacacgcaattaagcaccgttcaagttcaatgtggcacctaaaatgggaaagacaaagcttgaaaatgtgttaaatataaaactgcttgttaagttgaaatgaagtgaaagaagggactttgacttttacttctgcctatatgtttgaaggcagcaaacttgcacttctggatagttacatatatttcagaactgcttaagcttcaaccaccatcaataataagcatattatttatatcaatctttgaaataaaaaaaattgcaggcatatgctccaaaataagcaaagggttatgactattgccaggaaaagacatgatgaaaaaatagtattgtttccaaatatcatctaaacacatatgcacacactttccgctatatccagtatttaaaacgaacctcctggggacaagataacaataatttggtttccctgttagcagcattattgccgggatcaagtgggccacttccacttcccaaggaagccaatttttaaggcttcaggtttgctcttccaaaattagctggctgaaatattcactgtgtggtctcccaggaaaagtagtggagctgcatttacatgaacaaaataagaaagtctctttcaatcctaatccacagggaaagccaaaattctaagtcttttcctaaaatttagctaatttcttatctccctcccctaatacttggtaactgaaaatagtaaaggttaatttttaaaaagccttgataaactacaatcctgaccattggagtataatttactttatatattaatatttcatttaaaaacattttactgatcgatcgattgattgattgagacagagtcttccctgtcacccaggatggagtgcagtggtgctatcttggctcactgcaaactccgcctcctgggttcaagccatcctccctcctcagccacctgagtatctaggattacaggtgtgtgccaccatgcctggctaatttttgtatttttagtagagaccaggttttgccacgttggccaggctgatctcaaactcctggcctcaagtgatcctcctgcctcggtctcccaaagtgctgaggttaaaatattttaaaatgtaaacttaaatgttcagaagtcattttatttaagacccttctaagttctgagtaaaggctaagattgcgaatggtgtaaaactgttactgtgttttggaagtagttcaccacagtcttgcactcctggcctcaagccattcttctgcctgagtctccggagtagctggagctacaggtgcgtaccacatcacacctaggcctcccaagtagctgggattacagcagtgagcctctgcacctggctgcttaagcaaaggtaatttgggttctcgcaccttgcaaccaatggggtcatagtcaatacatggatctgtgccaatctgggaaatctaaaaataggtaaacttacatttcaaacagtccttgtttgaatttttgtcagactttattttcagatatttggtgaagggttctaatgtgagcctgactgggggctggggaagcctgtacatatgaagttaaaatctgcggtgtagtgcacaaagtcccctgagggtcctgttcaggccttggtgttgaacatcatctattcactgatgtcaccagatctgcagcctggattcctgaactctactctcccatatctaatttcctactgacagcatccacttctttgtttagtgtgtatttcaacctcaacacatcgataactagactcctaatcgccttcctcaaacggctccactgcatcttctgctgactcagtagaaagcaatgccattcttcctgatattcaggccagaagcctgacctgatccttgatgtctttattttcctcacacctgtatccaaccactaggaaaaccgactgaatagaccttcgaaatagatccggagtctgtcttctacccccaacctcctctgctctccccctggtccaagccaccatcatctctcacctggattcactttccaacaggtcattctacttgccccctttccccgaatagaccattctcagcacaggaatcagatgcgtccttcttctttttagagatggggtctcactatgttgcccaggctggagtgcagtgtctattcacaggtgcaaatatagtgcaccacaaccacaacctcaaactactagactggaagtattctcctgtctcagcctctggagtatctgggactacgggctcgtcccaccttgcctggctaaaagcatccttttaaaaccttagtctggccatgtgacttttctgtttaaagtcatccaataaagcccccatctcactcagcagaaaaccccacgtcctgaaaaccgaagtcctgatctagtaagtcccccgtgaaaaggttctgctccttctgactcagggccttttagtgttttcttgttcacttggctcccaccacaccagcctctctgttattcctcaagcttgccaggcaaactctagacaccgtggttgtatctcttccctttacctaggatgtcccttccccaggtatccatgagctgtcttgaaccccttcacatctttgctcaaaatctcactttttccaggcagcttttcccgactattctgaaaaatttggcaagccccaaatcccaacaactgccatttctctccaggcaataaaataccacataaaataatattttccttcttttgtttgcaagtacttgcaaaggagctgacaagttttatactatatgataagtattcagaagaaaagaagctcctgaagaaaaaattattcaatagaattatttcctaaaatcataaatatattgtttataagagacaataaattattcttttggccataagctagtttgagttggtttctgtcacttcaaaaggattaagatgaatacattcatttatactgatctggcaaatttaaagaataaatgttaatgattcaaagggctttcgtttaaatctatgtctcctaaaaattacattaaagtattatacctatttatccaatggtcatacttctggaaatttttctcgaaagaaataatcttaaaatcagacaaaggccaatgcataaagaagttcatttgatgcctcatttgtaatggtcaaacattaaaaataaactaaaattttagcactgtattagatgttttcaaaatgtagctcacagacctgtagggatccctgagacaattttaggtgatctgtaagaagaaaatcgttttcatgacaatgctgaggtgctgtttgcctttctcatggtgttgacatttgcactgttggagcaaaagccatggtgggtgagactgctgggcgttaccatgaatcccagcagggacactaacaggatgactattcattgtactgtttaccgatgcatactgtgagttggttttttaaaaatgccagattcacttacagacacttgacgaagcaggaaacataacagttttattacatctttaccctaaagctcacgttatttttaatgttctatgtcctgtgtaataaaatgggaagaaggcacagtgtttcctccacctcctgagcagcacggctattttcaagcagagtatgtctgtgcttgcttgagttgcaaattcgaccagctgcttttcttcatggaattccatttctttcttaaaagaatggctacctaaaaacgatggttatgcggtcttttctatttgtcaaacaatttcttacagataaatgagcccatcactcctacaattacaattgatggtgtttattataaataataaaattgaatctttcaagaaagaatagaattttagaaaacttgcatccatcagcatgaacttgacagtttacttgaagactttctgatgagatcatggtaatgttagtagttgtgatattttgatattgtataacaaattgtatcaacatttggaagatctgtgtaacacagtgaaccaatcatttccaaatgatcaactttttatgttacaaaatcatgtgtgggtaaaacattccttccaagggtatgatagaccaatgaattttaagatgacagagtacagaaaatgtgttgatatggcatctgactattgcaatgaaccattaagatactgccatgttttaattctctgcatagtatggagtaccattaggtgttttctggtttattcacttgttttatttgtttattgtttgtctctcctgactgagaagagagtcaatgaaggaaaggaccttgcagacctttttcattgttgtattcctcagtgtctagagtagtgcctggcatgaagcagatgttctgtaaatgaggattaaataaataaacacaaccaccaaatgaacctttatgcagcctggtttaccaagaatatctagtgatttgaggaaattctcaagacatatggttattaaaaaccgatttataattatgtgcaggcatatctaatatacaatgcacaatacatattctataatatataatgtaatgcaatatatatgccccgtaataatagtatacacatattattatttccatgtgtgtgtgtctgtatgcgttctcacaaaagtaaaactcacagggttggtgggaaaagaagcttggggaagaccacaggaaacctatgcaactttgtaacaagggcaactaaaagccacttattggttcctggagagagaacttggacacctcagacaggcagctcaatgtggctagaagcaacacccacaggtttcggaaatagttttataacatattagttctattcctaggacccacctcaggtagattccttacataattaaaacaattttatttcatattcagctcaggaaactgacttgtagaatagaagaaatgagtctttctgaggctctgccactaaaagtctgcgtatccttggatgagtctgatcaccttattgtttttttctggtaaggagattgtagtcaattcaaattgcaggatctctaaagatcatcctgacaggtagattccatgacagtccatgtcatgatgcaaagaataatttaatgaggaaaacgttctgtggcatcctttaaacatataatttctatgttgttgctttgacctgctcatctacagaagataagacgtttgtttgaaatcctcatccaatacagaaaatcccttccagtgaagttctaagagaccttgcttttaggaggttttaggaaaagaaggttatttatttaaaaattatctgagagatgactagataatgaagctaatgatgtgctccttttttttctgttgtattgttaacaacacatgccctctggaaaaccaagccaaaattccacctggagagaaaatcagatcaactaaagttcctgtgaagattcagtcagtagtaaagaggacatctcatgttccctgtcattcttcagcctgtacaattatcctgctctaaataagcagatcttggattacccgacttcaaatcattggtctgggaagtagtcgggctatggaatgagttgtgtgggaaccaggagaacagggcttacctttcacggtcacgtggacgctctggctggtggagagttgtggttgaaccaacacgttgcacgtgtactccccctcgtccacttccttttgcacatctgaaagtttaagagttccattgttctcaaatgccacttggcggtggttgaaaggaagcaggttagagttcttgtaccatttaatggagtaatacggatagccaatcacacgacagtgaatgtatgtgtcccgtcctgctattgctgtgatgtttttcattggtcgaatgcttgcaggccctggagagacacaaagaaactcttgaaaataatttaagggtacatctcatgtagggaaatgggtacacttttccttgagttaaaaatgtagattatattcatgtaagcacatctttttcagttaaacaaatatttttgcatgtggcattttctacaacaaaggtttttctttccttttcttaaattcaaatgtataactgtgaaacactttatctgctacttctatgaaaatgttttgaattaaaaattacaagataaaaggcaatttaattaatagaaagtaactagtctatactggacaatcacgcacttttggtgaacacactggcagcaattgatcaattgtttaactctctctgtaaaatctaggacgacaatggaggttacatcacgttgcagcatgaatgtaagtttaataccatgtacatgaaggtttaccatgaatgtggaagaaccgaagagaaggagaagggaaagggcatgcagagcataaaccaggaaaggaaacatcaggtgaacagatctagagtaaaaaagaacaagctgactacagaaaccaaaatgccatttccaacattaacccagtcagtgccattcctgagtaggaaggagagggtaggaaatgggaagcaacagttaatccgctctggcattccaagacccagctcggtgcatgcagaaatcttcttctccactataatgagttatgtgtgtttttttgaggagctgatttgacaagcacctcttacgtttattcgagcctggtacaggacgactcccgccgagttgttggcagtgcagcggtagactcccccgtcccggacctgggagctggagatgttcaggtagctgaccacgttcccctccgacgtgatcatctggctgatgcggtgactgccacccttgagaatcgggtcatcgtccagggtccacgtgatcgtgggcaaaggtgttcccttcacgttgcacataagggaaaccggctctgctggactcaccaccttttcactaaaggcagaaataattttgggagttccatctgcaggaaaacaaattatggaagaaagtggcacatacaaataattaaacaacttccaagtatatgtctttcatgtctagggggtaaatgtcgtagttgttaaacattaccaaaaaggtctggttttcctgataaagcaaaacgttaatcagaacaagagttcactgttttcaaaacaggtaagcacagtgttagcaagctttcatcaactgtttctatatttcctgattgacttaagaggaatggtaatacaactcagatgttcaggttaaacaatgacagctcctaagaagtccttaatttaaaactggtgtttcctcacacaaagttataaacagacggaaaatccacacccgctcactcccacaaacagtcactttatctgttaggttggtgcaaaagtgattgcaaaaagtaatggcaaaaacagcaattacttttgcaccaacctaatacttcctcaagttatttggggttttctcactagggaattctttacaggaataaaggaaactactgagagattgatgacctcatcttcatcattttctcataagaaatcctcttttaataactttaattacaaatagtaattgcatgcaaacttccatgaagtctctgagaatgggtagaagctaaataaagtttgtattaaatgccgtgtattaaaaacctctaaagatatcttaagtagggtacttaagcatgttttaaatctctctaaaagtatcttaagtaggctggccatataatttaacatccaacctgggacacttttgaggctgaaacagaaaggactaataattatgccaagagaacaggcatgacccagaactatcgcaggcaaactaggatcttaatcttagagaagtctccatagaaattttcagtatgtttacatagatcaaattttcatattccattatttttctatcatccatatggttttttctcttatatagtaatagttacaaatgcatgtttcttttatatatgtttttccatttataaaaagaaatacatgcatattaaaggaaatgtatgaaaatcagaagaaaagttaccaataggtcagccagcctcaggcatacaaatcaacactgtgacacattttttctaggcataagtgggtcattttgacataattgcaatcacatgccacaggatttctgagtctggtaagagaccttgctggaggggacatcttttgttttttaaaagaatttttgtgttcaattaaagggttgtcccataatgaaagataagaatgagtagattttttttagtttttgattttattataaaagtaatgaatctccattgttgaatatcttttttgttgaaaattggaaagtattataaacaaaaagaaaggaggcaagcaaaattaggatagcttgcaattccatcagggaaaggtgacagttaatggttaatagtaccagacacctttgaggaaagtgccactcattcccccagaaccttggggcctagttcttggtcagggaggccagttatgtagggtcttcatggtgatggggctgtgctgcagctcttccctccaccccctactcctttccaaattcctgaatctcacttcttcattccagctcatgtttcaggtggctggagaagtccctggagtttgtttcctccaggctatgctcataagtagcatattgcagtgtccttgggttgtaagcattttgtctcttactatcagagatgaaaaagacaactttaaaatattaaaatgaaaaattgatgcttttgtctttaacgcactgcagacgttgcctcatcacatcctgtgtttaattttacagagaagttagatgtcatcatgattgctattcattgtccatgatcagtcattaatacttaggagtactggagttatttcacgtgtcctttataattccatggtttttgtaaaatgtgtttagctgtagatttcttttcactggtttttacattaagctctgaaaactcaagtgtttagaaaaatgttcttcagttatacttctctttttgtaggtaaattttacatacagtgaaatatacagatcttaagtgtacagcttagttttgctaaatatatacacaccagagtaaccacaaaaacgatcaagatataaaacatttccattaccaaaattccttaagtgctcctttcaataaatccacatccaacagagatcactgctctgattcctcttaggatgtgctggttttgcctgtgcttgagcttagaagaaacataataatagagtatgcacgctttatatgtgcatatatatcatcataatcagagtacacttagaatataattagaagatgtaactttggaacagtactattatctaactcactgtccacagcaaaattctgtccattgaccgctaatatccctcgtcactgttttttttccagagcagtccgtatcacccattatttatgtttcatgtcatttcagcctcttttcatctggaacattcttcagcctcttttgtgtttcttgacttttacatttttgaagagtaattttgtagtcagttgctgaaattgggtttgtctcatatttcctcatgactaaacgcaggttgtatatttttcccagaaataccgtggaaggcacgtgttttatgtgcctattggccatccgtgtgtttcctttagtgggtgtctgctcaaatctttggccattgttatattagactgtttgcctttttgtttttgatttgttgtggaatacaacaattgaaatacaaggaaatatatatatagtatctatgtcagatatcttataatgatctgatacatttgtaagattcctatagagattatatataatatctgtcaacatatatatgacacatatatttgtgtgtgtataaaatattttatcccagtctgtggttgcctttttcttttcttaataatgtatttgtgttgacatttaatgctttctgtgtcctaagaaatcgtcacctattcgcaaatcatgaagaattattctgttttcttttggagactgtgttgctttatactttatattcaattctatacggatagcaacttaattttgtgtggatatgaagtgtgatgtagggattaatactcatttttttgccatacatttattgagttgtttcagtgttaatttgttgaaaaggtacatatagtatgtgtatatgtgtgtgtgtgtgtgtatatatatatatatatatatattttttttttttttttgagacagtgtctctctccctctgttgtccttggtgtggcacaatctcccaagtagctgggactgcaggtgcacaccacgccttttttttttttttttttttttgtagagacaaagttttgccatgtttcccaggctggcctcaaactcctgggctaagggcctcagcctcccaaagggctaggattacaggcacaagccaccatgcctcagttttgcttgaaatcacattaatcgttttagagagaattgttaacttaggaatatttagttttctaatccttgaatatggtatatcttttcaattttttaggttatttcaattttatattagcagagttttgtatttttgtatgttgaaatctttcacgtttgtttaaaatatattcctatcttatgttttatgttattgtaaatgaaagtttcaaaatattagtttccaattgtttgttctgagtatatagaaataaaattgcattttgtgtatcattcttatatccaatgactttttaaactctcttttagaaattgctttattgttttcttggcatattctttgtaaacaacaatgcctgtaattaagacagctgaaatttttcctttccaaactccatccattttatttctactcaagcctaactagggctgctagtataatgttgaatggaagtggtggatgtgggcatccttgatttggtctcaatcttaaatgaaaaacatttagtgtttaaccaggaagtatgattttagctgtagattgttcaggatgccactcattaggtcaaggaagctctctagagtctcagtttgctagaaattctttatgctgaatggatgcaagtttcatcaaatgattttttctgtatatattgagataatcaattggatttgctcccttattctattaacatagtgacttacacggattagatttttaatgttcttccaatcttgcattataagataagctccaattgatttacacacacacacacacaatctatatgtatatcaatgtgtgtgtatatgttttaaattatctctgctaaaagttaagattgcagtactttatgtgaaatgtaagaaccctgcaacaaataattctgccctttgtgttattacatctattatatttactctataataaagtgttattttattttactttattttatttattattattttatttcattttattttattttttattttattattttatttcattttatttattttattttattttatttttagagatggagtctcactctgtcacccaggctggagtgcagtagcaggatctcggctcactgcaacctccacctcctgggttcaagctgttctcctgcctctgcctgtagctgggattacaggcacatgccaccacacctggctagtttttgtatttttagcagagacaggattttgccatgttggccaggctggtctcaaactcctgacctcgagtgagccgcctgtctcggcttcctaaaatgctgggattacaggcgtgagcgacagcacatggccaagtgtggtaattttataatgttataatcatcaattgtttaaagaaattaaaaaagaaaacacaattttgctaaatatttactaatatatttaccatttctcatggtatttgttcttatagatatgtctccattttatgttccatttctgttccatgttatctatatcctgtagatataaatgtccattctctatatccggcatgacttcatttatcatttattaatgtgcagggctgctgacattatattctttcacctctttattactgaaaatatctttatttttccttaatttttaaagcctgttgttgttgggttttttgctacagaagtctgcgttggcagggctgtgtctttgtttttcgttttcttttcaacattttaaagatgttgctccattgtctcctgtcctccaaaatatccgatgaatcatctaccatttgttattgatgtcctcattatgtaatatttttcctccctcagatttttaagtttttctctttatcttcggttttcagcagcttaactctgatgtactgacatagaattttctttgtgtttatttttggagtttgctgagtttcttagatctgcaaccttacttttataccaaagtcgataaaactaaggtcattatctctgaatacttttttcttctgcattccgtatctcctatttttctgggcctctagtcatatgtgtgtgtcacgttatctgatgatgtcctacttgtcactgaagctctaatcattttctttgcagtcttctttctctccatgcttcagattgaataattttctaagatttatcttcaagttcactgatactttcttcttccttctctaatcttgtattaaacaaatatggtgattttttttcatttctacagactgttttctacagtttcaatttctctgttggtctttcccatacgttcactctttcagtccatattttcctgtaagttattgaacatattttaaatagcatctgtaaagtccttgtttgccagttctaacatctgggtcctctcatgatttgtttctatcgtttgctttgtcttttgtcctttgggtgcagagtcctgttttttgtatgtctcatttttattgcacatttgtattctcactccccatttttggagttcagatgtgtcctcagtggaagaggacactccccaacttgattttggtgtctctcaaatgtctatatatacttttgcttttcccaaagtttcttgtttttatcatcttgggagttaggctgatatatgctattttaccattcccagaactggaaacttttattattcttttttaaaatcattccatttttcaggtattatggttttatcctgaacttataattattaaattccattttatagcctcataggaaatattctcagattctccattgtatctatcctcagtcctagttcacagtattgcaaatttttataattttactttaatccatcgctatttcagtgagaataatgggagtgtttttgttttccagaggaaattagccagacactcttttaaagcaggtactagatatgtatttgtaattccatttctgctttctttgctacattagcactgtcatctctcagaagagagaaaaaaaaaagtgaagcttcttgtcctgaatggaagctgacatgcgacaaataaatctgcgagtgtgctggcggtgcgcctcggccccctttttagttcaagtgacaggctcttttggagatgaaagcagacattattttcccagggagacctgagtgtctttgaaatctttcttgctgtcactctgataacctgaactcttctgacatcgttatggatcatcaatatggtctttaggttttcttagttgcaccaaatggttgccggggtaactgggcctagacaggtaatttctcctttttctacaaagaatctaaaaatagtgactatgtaaggactagagtgcatcatcattagcaaactggttctgcacaaattgattactttctgcacttaattattatacggaacacagtgtcaggcatttaatatgaataccatgccttcagctaatttcacctctgctttaaaaatctcactgtctgcaatgaaacgattgaatcaaaataggaatctcattgctaaacctgctacttcttaaaaaattagctaaggttaaaaaagaatgacagaaatatggtcttataatcaagatatatttaaacttactttcacatattagtgtgttttctttgtactccctttaggctatatcaaaatcattttattattttaatcaattgatatcagatgaattttaaattatatatggacataatttccaacaagacacacaaatacatagatagaagctagttcaatcaggtagtgataaatatatgttgcctgtgatagcttctttctctggctgactgataagctttaagatttagtatgcagtaaccagttaaaaaaaagcaaatcgtatcacatatccaaaacctgttattataccacaaaataattcctcacaaatttcatttacttaaatctgagaacatttggatggaactagggacaactgcaccaaacagatgccatattttcattctaccaaccactgtactgacattttgctctgcattttcaatctgaagttgtacttctccactggaggctattgcccccaccccacccagcaaacacctggcaatgtctggagacatttttggttgtaacaacttggaggaaggtgctcctagcatacatctagtggaaaggggccagagatgctgccaaagatcctataacacataaaaaagtttcccaagatgcctgtaatcccagcactttggggggccgaggcgggcagatcacctggtcagaaattggagaccagcctgaccaacatggagaaaccccatctctactaaaaatacaaaattagccaggtgtggtggtgcatgcctgtaatcccagctactcgggaggctgaggcaggagaattgcttgaacccgggaggcagaggttgtgatgagctgagactgtgccactgcactccagcctgggcagcaagtgtgaaactccatctcaaaaaaaaaaaaaaaaaaattccccaagcaaggcattcttgaaagaccctggtctagagatgaataatcaacaaaactgttaagtgtcaagtttcttctaagatttaaaccctggcagataacttctaatgcacaagtgggcaacatttatgttactttacattacttctaatatgaaacaattttattttcgtcagaactttctctcccatttgcctgatttagcttgaaaaattagggtagagtactagctggtgagacagagagcctagaactgagcgatcagcactgcttcaccctgtcttcttcttttctgagtgctctgggtttgggttctttttcagccataccctgaaacgaggcccactgaccttcaaggaccacctgcacatagtcttgagcggacagcttgtccttgcgcacaaagcactggtatgcgcccccgtcacttttgaccatgtgatccattataaggttttcgtggttgatccctgtgatcctcacattttttccagggttgaggatttcaccattgcggtaccaggagagttcctggtcctcagttcctgtcacgctgcaggacaaggaaacttggctacccacgctgcttttaaccttcctgggactgatggtggctttcagtggctctggaggttttagtaagagagagagaaaaaagataaaaacatcactagatagcatttcgacaacaggctggactttcaacaaagcaagtgcatcacgcaatcatactccacacagttcccatcagccacattattgcaatcatactccacacagttcccatcagccacattattgcaatcatactccacacagttcccatcagccacattattgcaatcatactccacacagttcctatcagccacattattgcaatcgtaccccacacagttcctatcagccacattattgcaatcataccccatacggttcctatcagccacattattgcaatcataccccagagagttcctatcagccacattattgcaatcataccccatacattttgtatcagccacattattgcaatcataccccagagagttcctattagccacattattgcaatcataccctagagagttcctatcagccacattattgcaatcataccccatacggttcctatcagccacattattgcaatcatacccacacagttcctatcagccacattattgcagtcatatcccataaagttcctatcagccacattattgcaatcatactcctaacagttcttatcagccacattattgcaatcaaactccacacagctcctatcaaccacattattgcaatcatactccacacagttcctatcagccacatttttgctatcatactgcatgcagttcgtatcagccacattatttcacagaggagcattttgtttgggaacatcctcttcgctattttttatttctggctttatttctctttgcaacaaatgcaataatgttggtcaaactgccttctcaggagtctctgtgaggatgttgatataaatccactgacaataagagatacaggccaggcatggtggctcacacctgtaatcccagcactttgtgaggccaaagtgggaggatcacgaggtcaggagatggagaccatcctggctaacacagtgaaaccccatctctactaaaaatacaattagccgggcgtggtggcgggctcctgtagtcccatgtacttgggaggctgagggaggagaatggtgtgaacctgggaagaggagcttgcagtgagctgagatggcgccactgcactctagcttgggggacagagtgagactccatctcaaaaaaaaaaaaaaaaaaagaaatgcaacatgctggctaccaatagtgacctaagtattgatcatataaatcctaatttgccttgtcccaaggtggcactggtgggtttgccctgggccattctcacacacatgtatgacatatgtggtttacccagggccaataacacacaattgtgaggaaaaaaaaaacaaaaacaggttggtattagaatttgtgaccacgaaacagagtttttctttaaaatggggctgagtgatttagacagggaagaaactctcatcctcgccttgctatgttttcaattcaacaaccttaatccaatgtagaaaacatttactgagcatctgtcatatgccaaggatgaggttaaactcacaggcaagaaaaatggaataatatttgtggtgcagctagcttgtgctataaaattatcgactatctttcatacatcatttaagtcagtcttctcctaatcctgtaatttttgtgttatctctattttacaaaacagaaaatagttattgagagcgcttaaataactcagccaaatccaatcaacaggtaaatggcaaatcaaaacaaaacaaaacaaaatttttggtgaaagacctacagttacagatttttaaaggtcagaaagtgctgagcagagaaaatctgatgaaaatcctgtctagtcatattacaaattatggaaaacgaaaaataaagagaaattctttaaagcagacagcaaaaatggcaaatgacatacagagaaacaaagatctgaatgacctctgattgtttagcagaagcaaatggaggccagaagacatataaatatatcttttaaattaacaaacatctcttgtagatggcagatggctaagatttgctttttaatccattctggtaatcttctcctattattattattattatttatttcactttaagttctgggatacatgcgctgaacctacaggtttgtttacaccttatacgaaaattaactcaagatggattaaagacttaaatgtaaaacctaaaaccatagaaacgctagaagaaaacctagtcaataccattcaggacatatgcatggacaaagacttcatgactaaaacaccaaaagcaattgcaacaaaagccaaaattgacaaatgggatctaattaaactaataagcttctacttactcagcaaaagaaactatcagaatgaacaggcaacctacagaatgggagaaaatttttgcaatctatccatctgactaaggtctaatatccagagtctacaaggaacttaaacaaatttacaaggaaaaaaacaaacaaccccatcaaaaagtgggtgaaaaaaaagcttttttttaccccagttgttcctaacttttcatctcaccacactttgttttcaaggagctcagtcttctaggttgataagacaaaggcaataaatggctgtaataaccaaccagagtgatggaggggccattagagacatagcacatgtggaggagggtggatgggaagagcaggaaatccacagatatcaagggtgcatagaactgagatcagtcagaatggaaagagggaatcacagagattgggaaccacatgaattaaggcagggagcaggggcatgtctgagaatttctgattcattttggatgcaacagagagtccctgagattttggaattaaacaaagataactaaagaaggcattcaaaagtgtttagcaaataagtcatacttttttttttttttttttttttttttttagaattggggccttgctctgtcacctaggctggagtgcagtggcacaatcatacagaggagtttctgtagcctgaaactcctctccctttctgcctcagcctcctgggtagctgggactacagacacaagccatcacacccagcacaaacatacttttaatggaatcactaggtcataggtcttttgacaaattagggtgaggaaaacccgtcattgaagacattacacatgtctagtgtaggtacaattaagatccaatctaggacaggacagaggttgagaacagagctgagtaactgtgagattcagtttgtatgacttggcaggacatggcaggacttggcaggatgtagaaaggaaaggcttaaagggcacccaacatttcatgtttgcatctgagggatgagaaggaggaagatgttgataataataacaagagccatttggaaggaagaggtggtggagagttcagtttggtatccgaccctgttgttttgaagtgccaactaaatttctgaaagaaagctggttgacacacttgtctgacattcaggaaggacgccaaggctgtaagtacagattcagagcttattttcaggggcaaggaattcgaagctctacaaatgaaacagagcctaaggaaaagggaagagcttgacaagaagacagttctgaatttggagcccaagagaatgccttccaatagagaagagagataggaacgaagaagctgttttcttctgcagttagaagaagcagtcagaagggaggcagagaatattccagaagcattggagaatcacctagatgtggaagaagggaacaatgataaaaataagcacattaagaataaaggcttttaaaatataggtagtgataaacgcctttagagagaaagcagtaacatactctgagttgagaaggagacaggagaatggggaacaacacatctttgtggatggaggctaagagagttgggaagtgttagataaccaagtattgggaaataatcttccatgtggaggaagcaacataagtaatgtgacttgcaatcaggaaaggaataggtttgtgcagggattaggaagaagttagatttagcaggaataggtttttattaacccatttatgcctgaggttgcaattttttttgaatttttgcaatcagaccttggtgatgaccttgcacagtaggatgtaaataactcccacatgcttagtgttccaataatggaacactagtcataagtgggttttaatgcaaaacaatgggaaatacaaccagacagatttgcttgagatgccttcagtactatcctaagatataaactttattcaatggagaacagggagctaggagaggtctttaaacacagaagagactttgagcccgtgggaataattcttactggctgtccaatgctgcattattttatccacatgattcttcagctatagaagtgtgactgtggattttatcatccatttctttctaatcccagactaaacatattcaaatatttgcaggattcaggctggacagcctgttccagatagagagtcatttggatatttaatataaatatattctcttaggctggtgttgcgctaaggcagtctacactcaggttgacactgaagagaaagttccataaacagggttagggctgggtggggaggaggaagtaagaaaacacttctattgtcactgtgagattcttgtggttaaatttgttcaatttagttcatcaaataaaaatatattttcaaaaaaggagcattatattggcaactaagacctcctctctgaccaatgctctgcctcccttttctggccatgtgatcttgggtaattcactttaatttggtttctgcaagagcaaaattgagggtggttgagtagattagattgtgaccctgcgatcacatccctccttcctccaaatctgccttcagtatccttctgaacacattcctcaaggcagccaaggcaatcaatagaagatcaaataaatccattatatttggagtagatgatctataatactaggcacaagtctaatatttgggtatgtttgagccccgtactttgggtgataatagcctcatttagaaatttaatggagaaatggtctggaaacagacaaaggacaactgctttgattggctaccatcacttgtgctgaaagaacaatcctaccctctctctctgttcatttttagagagactggttgttgtgaattcatcagctaggaagtgttatcttgaaatcatatcttggaaatgtaatagtctgtggcctaatggaaatcacagaggtttggggatcagaaagatttcaaatcaaatccgacagccaagactctccagttgtgtaaccttggggaattcatctgagcattaattttcacatctgtaaaatgaggtttctgttgatctcagctggactgttttgggagttaatggaaagctacagagaaaacatggagatttgcttataacaggagctccatcgatggaagccaacaccacctttgcaagttaccgtccaacttacgtttcacgtacaggcggcctatcaccttagcagttccgtatctgttggacacttcacaaacatagctgcctgagtccgaggggcgaatgttctcaatgagcagccccgtcacggtcttctggaacctccctgaaagttccaggggcatgttgtccttcagccagcggtaatctggctcagggtgcccgagcgctttgcaaggcagctccacacgctgcccagccatggctttgcgatggtcaaacccatccagtatggatggggctgagttcgctgggtctgtagaagaaataaaaactcttagaggcaggaatgaggagttgaagtggtcatttagaattgtaggacttcatgtataacttaaatacggtgcatcataccaactattgatacagatctttaagattttataagtgaacagaaaaagaagtgccctattcatacaatttattttctgctcagaatttacaaaaggttgaacactggtcagagcttctgttggtcattcctcagtaaatgaataaaagatccagaatgagcaggcttcaacaagagctgtcagctcaggccaaaaatcagattgtcttttcataactgggaatgtcagaattctctttaaaagatccttaatgggtacaaatatgcaatttgagataagaaataagacctagtggtagacagatcagtggaatgactatggtttgcaattatgtattgtatatttcaaaatagctaaaacagaagaattgaaataattatagcttaaagaaaagccaaacatataatgtgatggatatcccaagtacactgatttgattttaacaaattatatgaatacattaaattatcacatgtaccccaaactatatatctattatgcatcaataaaatatcataaaattaataaaataaatattttttaagttagtggctcactctgtagctcaggctggagtgcagtggtgcaatgattgctcaccacagtctcaaactcctgggctcaagtgatcctcctgcctgggcctcccaacatgctgggattacaggcatgcaccaccacacccagcctaaataaatttaaacagaaaaaaagagcaacactaggccgggcatggtggctcaggcctgtaatcccagcactttgggaggccaaggcaggcagatcacgaggttaggagatcgagaccatcccggctaacacggtgaaaccccgtctctactaaaaatacaaaaaattagctgggtgtggtggcgggcgcctgtagtcccagctactcgggaggctgaggcaggagaatggcatgaacctgggaggcagagcttgcagtgagccgagatagcgccactgcagtccggcctgggtgaaagagagaaactctgtctcaaaaaaaaaaaaaaaaaaaaaaaaagagcaacataagcagaaatagctgtttaactttagtaaaatttattgcacaaaagagttttacacatagcttttgaattttaaaacattttatttattcatttcacaaatatgttttgatccctcagtgtagaccagcacagagttagggactaaagggagagtggtggatgagacaggtgtcttcctggagctcatgttctgttgggcgggtggtgttggggagcaagcaacacattagcaagcaaataaagataatttagtttgtaataagtgtagttaaagaaagaaaaagagggcataacagagagtgaagtccacgtgctatgggtgtggaggcagccaggaggactcaagatatggtcctcagggacagactctctgagaagatggtatttgagataaggtgaatgagcactaccgacagcatgtggcgtagcaagacaatggattaaaaagcagcagcttgcaaatgatcacttatgacagggccttgtataattttcctgttctgtgacatcatcttgaaccaggtgaggaaattgataaaatattctcaagaactgggtctgtggaaaccacgcagctcaatgtccttcaagtttgtttgaatggagtgatgttcccaaggtcataatctttgcatgactatgaagaatataaaatacagcacctgattggatgctaaacgtaaaactcagtgttctcaccctgctctctcttctaattcaacctgtttagaacttgcatgaaacaatacccttgcattccacatggatattacagaaacgttatagactcctgctacctgaaattttcttgtctttgcctcagtgagaaaaatgccatgactcttttgatctacctgcaataaatctgatggccaaggaatggatattcactgtcctatcaaatgagagccatctggaactttgtaattttgacgaacatctctattccctgcttctctgagtttgacttttttagatttcacatgtatgtgagaaaagacagtgtttgtctttctgtgcgtggcttacttcactaagcacaatgcccttcaggttcatccatgtcattgcaaatgggaagatttgcttccttttttaaggctgaataatattcctttgtgtatataggaatgatattcctatgcatgtgtgtatatgtatatcaacacttaagtttttttcatattctggctgttgcgaatgattctgcaataaacatgggagtgcagatatgtaatttcatttcctttggatatatacccagagtgggattgctagatcatatggtaggtaaaagggtacaaagcttcagttatgccagatgaatagattctagaggtttactatgcagcacagtgactacagttaataacactatcttacatacttgaaatttgcaaagacagttgatcttaaacattgtcatcacatacacacacatacatacatacacacacaaatgttaactatgtgaggcaatagatatgttattttgcttgatagtgatatatatatatatatatatgcacattgtacatcacattgtataccttaaatatatacaattttcatttttcaatacctcaattaacctggaggaaaaataaactctagccaaggagatgtaacaggcgaaaatgtgtggatttgtaggaaattctgcttaaaggcgacttagctgggaggggtgtttttatgcatttttcctttgcttctttacatcacctggaaggtggatataaaggtaggagctgcagcaatcactttggactttgaaatcatattgagaatggaactgcacgtgaggataatggatcagaaagataaaagcctggtcccttgtgaaactgaagctggcaaaccagcttctggacttatatacaagagagtaaatttctgttttaataaacaataacatcaaaaaatcatttattagtaggaagacttctttaagaggctgtgattccgtagtcagccactgagggcagtcagcaggcactgttgaaaatagaacaaaaacatttagctgaaatgtcttggctttctatttcttttgtgatcatcagagataaaacttcattatgaacttgctgctctttttacttcactggtgtcttatgacagtgatataatgagggaacctaaatactcttttaaagaatacttgatgagcttccaggactcctctaattcttcattaactgaagaattctatattccagaattacagtcattcatatgcatgactatagggctccagaaggcaagagagatataaaagtttcacaatacccaggtacagagcctgtgccagcaaaaacttcattgcttcatttacctgcttctaaaggaaattacaaacggactttgaaaagtattggtttgaagatcaagttatgttcccatagactgaataattaagtggagacaggcctaaccaatgatgtctcactgatctctggcatcttctagcatgaaccaagaatccagaaaaatggttagctgtctgcatccatgttactggaagtatcatcacctgcacacccaatgggttcagtgaactagaagacacaaagttgtgcctaaagccagctccagaaatggtcctggacatccttaaccacatgggattttttaattcctagtacactaacttgcagaccatataaacaccattgcaatattgtttagtaagtagaaatcacatccaagataatatgtattacttggggtaagcttctctattattctgaactctgtcttcatttaattaagaaatgtgagaattggacacaggaaggggaacatcacacaccagggcctgttgtggggtgcggggaggggggagagatagcattaggagatatacctaatgttaaataacgagttaatgggtgcagcacaacaacatggcacatgtatatatatgtaacgaacctgcacgttgtgcacatgtaccctaaaacttaaagtataataaaaaaaaacaaaaacaaaaaatgtgagaatataatgatagctctcgttcttcagtaatacagattttagttacactagagtggaatattgaagatattagaaagtactatgaaaaaatagctgcaaaatctgtcattttacttagagtaggaagtagaagtagagttggagaaggtggcacaaagatgtcacccctttggcaggggtggctgacaataaacaccacagtgtgcacctctgactttctttgcagaataatcccacaatctctgaaaatgaaatgcaccaacttctaatgctattcataaaaaatcaactctcaatgactgcacttaaaaagttttattctaactgaaacttggcagaaatttctcaaatatgcttaagatagtgctatgtaattctaatgacatttttaaaaaatggctgagacaactggatatccacatggaaaataatttagaaccttgcctcacactacctacaaaaattaactcaaaatggattatggcctaaatataacagctaaaactataaaaacttttagaagaaaacatagggaaaatatcttcatgaccttgaagagttcttaggcataacactaagaaaacaagcaaaaacagaaaaaatcaacataataaacttcttcaaaattaagaactggcccagtgcggtgactcacgcctgtaatcccagcactctgggaggccgaggcaggcagatcacatgaggtgaagagttcaagacgagcctggccaacatggtggaaccccgtctctactaaaaatacaaaaattagccaggtgtggtggcatgagcctgtaatcccagctacaggcagaggcaggataatagcttgaacccgggaagcggaggttgcagtgagccaagatcatgccactgcattccagcctgggcaacaaagcaagactccatctcgaaaaaaaaaaaaaaaaattaagaactgtagcattttcaaaggcaccatttagaaagtgaaaaaaaattgaaaatcatatttctaataaagaactcaaatccaaaaaatattaaaaatgcttatatctctataatgaaaagaaacaacccaatcaaaatgggcaaaatagttgactattttacatcaccaaagaagatacacaaatacctaatcagtacacaaaaagatgctcaatattactaggcattagggtaatatgaattaaaatcacagtaagacatgacttcacacccattaggatgactgcaataaaatcacaaacaatgctggtgaagatatggggacctggaatcttcatacatcgttggtggaaggtaatatatacttacatatgcacacatatacatctcacgtaaaaatggcttgctggagtgccagccttcacatccacatcacagcaaaaatgcttaagaatgccccctcagtgaagtcacttttaagcagaatttcctacaaacccacacatttttctcctcttacatcacattggctagagtttattttttccccaggtgtattgtggtatacttgccaaataaaagcagccaaaacaagttggcattttcttaaagtgtttaaacttcaatttgccataaggccccaagttctaggtatctaccctaaatgaatgaaaacatgttcactcaaagacttaggtacaaatgtccatagcaggattattcataatcaaaaagtggaaacaacccaaatattcataatttagtgaattgataaccaaatgcagtatttacagatgagcaaatgctctccagcaacaagagagaatgaatgactaatacatgtaacaacatgggtgctgcatgaaagaaggcagacacaaaatccatatatcaatttatgtgaaatatccagaaaatgcaactctacagagacagaccatagattagtggttgtctgggactggggatggacattgaaattggcttcaaacgggtaggaggaatcttttgggtggtgaaaatattctaaaattaaattggcgtaattgtggcacgactccatgcatttactaaaattattgaattgaataaaccggatggagtttatattaaagtaaactacctctcaacaaaactgttttacgaaacctgaatgaggtatttatttttttatttcaacttttattttagatataggcggtatatgtgcagatttgttacatgggaatattacgtgatgctgaggtttggagtagagatcctgttcctcaggtagtgagcatggtacttcataggtagtcttttttttttttttttttttttttttgagacagagtctcgctcagttgcccacgctagagtgcagtggcgtgatcttagctcactgcaagctctgcctcccggggttcacaccattctcctgccttagcctcccgagtagctgggactacaggcgcctaccaccacgcccggctaattttttttgtatttttactagaggcggggtttcaccgtgttagccaggatggtctctatctcctgaccttgtgatccgcccatctaggcctcccaaagtgctgggattacaggtgtgagccactgtgcctggcccttgataggtagctttttaacctaaactctctgccttccacagtctagtgtccacagtgtctattgttcctgtatttgtgtccatgtgtggtcaatatttagctcttacttataagtgagaacatgaggtacttggttttctgttcctatgttaatttactaagaattatggcctccagctccatccacattgctgcaaagaatgagatttcattcttttttatggctttccagtataccatggtgtatatgtaccacattttatttatccaatctaccattgatggacacctgggctgatttcatgtctttgctattgtgaatagcccagcgatgaacatacaagtgcatatgtctttttggaagaatgatttattttcttttggatatattactcagtaatgggattgctgggtcaaatggtagctctattttaagttctttgagaaatctccagtctgctttccacaatggcaggactaagttactttaccaccagtagtgtataagtgttcccttttctctgcaccctcacagcatctgatgttttatattttaagtgcatgattgaagcaatgcttgagacaggctcttgtggggatatttggtcatatatcaaatctgaataaccgaacggcattgtctttcattttcatccccttcaaatttttttttgtctcaaagtcttcaaacttttatatatatatatatattacaaaaattatttttaccccaaacatttgaaaacgtacagaaaagtagacaaaaataatatgacgcatcccatatattcatcatattaatggctctggcaccaaaccttttctatttttcgtcatgtttatttcttgatagttttactttgtttttggtggtaaagtatatgcaacaaaagggaaactataggctgggtgcagcggctcacgcctgtaatcccagcactttgggaggccgaggcagggggatcacaaggtcaggagatcgagcccatcctggccaacatggtgaaaccctgtctctactaaaacacaaaaaattagctgggtgtggtggtgcatgcctgtagtcccagctactcaggaggctgaggcaggggaatcacttgaacccgggaggcagagatcgaagtgagctgagattgtaccactgcactccagtgtggcaacagagtgagactccatctcaaaaacaaacaaacaaacaaacaaacaacaacaaaaaacaaaaaagggaagctatgtcattttatcattacatgactagcatgtttccctaataaaaatacggttttgttacataaccacagtcagtattacataatatcaagtattatacactcccaattcatttttcctcatcagctcaaaagtggctagcttttaaacaattgaattaattaaatcaagatccttctcttgctcacatgcagttgttacatctcttgagtgtttcttaatgcagagctagccctcctcctttctcccatgtatttgacttggctttttaaagaaaccaggtatgatgttccccctcctgtgtccatgtgttctcattgttcaattcccatctatgagtgagaacatgcggtgtttggttttttgtccttgcgatagtttactgagaatgatgatttccaatttcatccatgtccctacaaaggacatgaactcatcattttttatggctgcatagtattccatggtgtatatgtgccacgttttcttaatccagtctatcattgttggacatttgggttggttccaagtctttgctattgtgaatagtgccgcaataaacatacgtgtgcatgtgtctttatagcagcatatgtaccctaaaacttaaagtataataataataaaaaaaaagaaaccaggtagttaccatgctgaatttgcttgtccatgtcatcatttaacttgttccgttattgccataggcatttttcttatgaactggaatttatttcagtgggttggttagataagtgttcaacctctctctctttgagaggggtgctgtgcacttcacattgcttccacaaaatgtatggttttcccgttcttagtgacactcaattgttcagtgaggtcagatgttaaaatttatctgagctattttgctaaggttgaaaatggaattttctaattgtgtcatttcgttcgcattcagtagatataattattctgcagaatgaactttcccttctgaactaaggttatttggttatcttaaaatacagcagctataggaaagacaatacatttagtggttgttgtctttaatcatctgttatcagaatgaagagttagtgccctggtttctactatgcagaccaataagattcttctttctttctttatatgaaatatatatgcaggtgtgcatatgtaagtatatatgtacatatgtgtatatatctatatatacacacacatgtatgtataaaattaaaatgaactcaaaggttttcaaaatatttaatggttatcaatcatgtgcaagcatcactgctgatactcaattcatcccctttggctgacgagagccgctttatgttgattcctatgtcattttgacaagaccccattcatgtttcagactcacctcagacatttcctgcctcagaccttcaatcagccactcctccaagaagccatggtcccttttagtagtgaattatatttaaaagaatctacaatctagatgttagaggggcttgttgctattgtttgctcatcacttctgggacttctcagtggaaagactgaaaattcatactttttttttgaagtgtgtaccaatagttttttgtgttcttttttttttttttttttgagatggaagttcactcttgtcaccaggctggagtgcaatggtgccatcttggctcactgcaacctctgcctcctgagttcaagcaattctcctgcctcagcctcctgagtagctgggattacaggcacccaccactatacctgggtaatttttgtatttttagtagagatggggtttcatcatgttagccaggctggtcttgaactcctgacctcaagtggtctgcctgcctcggtctcccaaagtgctgagattacaggtgtgagccaccacgcataccacaaataccaatagtttctattggaatttgacatttcaaggattttatgcattttttaaaatttagggaaaggacttcatgtctaaaacaccaaaagcaatgccaacaaaagccaaaattgacaaatgggatctaattaaactaaagatcttctgcacagcaaaagaaactaccatcagagtgaacaggcaacctacagaataggagaaaatttttgcaatctactcatctgacaaagggctaatatccagaatctacaatgaactcaaacaaatttacaagaaaaacaaacaacaccatcaacaagtgggcaaaggatatgaacagacacttctcaaaagaagacatttatgcagccaaaagacacatgaaaaaatgctcatcatcactggccattagagaaatgcaaatcaaaaccacaatgagataccatcttacaccagttagaatggtgatcattaaaaagtcaggaaacaacaggtgctggagaggatgtggagaaataggaacacttttacactgttggtgggactgtaaactagttcaaacattgtgaaagtcagtgtggcgattcctcagggatcgagaactagaaataccatttgacccagccatcccattactgggtatatacccaaagtaatataaatcatgctgctataaagacacatgcacacgtatgtttattgaggcattattcacaatagcaaagacttggaaccaacccaaatgcccaacaatgatagactggattaagaaaaagtggcacatatacaccatggaatactatgcagccataaaaaatgatgagttcatgtcctttgtagggacatagatgaagctggaaaccatcattctcagcaaactgtcgcaaggacaaaaaaccaaacaccgcatgttctcactcataggtgggaattgaacaatgagaacacatggacacaggaaggggaacatcacacaccggggcctgttgtgggatggggggaggggggagggatagcactgggagatatacctaatgttaaatgacgagttaatgggtgcagcacaccaacatggcacatatatacatatgtaacatacctgtacgttatgcacgtgtaccctaaaacttaaagtacaattaaaaaaaagtgtatatatatatatatatacacacacagtagtatatatacatatatatatatacacacactagtatatatacatatatatatatatatatacacacatacatatatatacacactaaggcacatctgttctcttagagcttaggataaaaagtacatatgtaaagtatttagaaataattatttcagttgtataaatgccttacatttttgttatatttcaagaatttctataaattttcaagaattataaaagaatttcatacttttatttttctcttatactgaaaataaaaataaaaataacataaacataatcacttttcacttatcccactatatatgctactataaataaaaatgagtatctataatatataatatataaacaaatatatttaatgtgatgattaatattgagtgtcaacttaattggattgaaggatgcaaagtattgttcctgggtgtgtctgtgagggtgtcaccaaaggagattaacatttgagtcagtgaactgggagaggcagacccaccctcaatctgggtgggcaccattaatcaactgccagtatggctaggataaaagcaggcagaggaacatggaaagactagactggcttagtcctccagcctacatctttctcccgtgctggatgcttcctgcccttgagcatcagactccaagttcttcaacttttagacgcttggaccttcgaccacagactgaagggtgcactgttggcttccctactttgaaggttttgggaattagactgactttctttctcctcagcttgcagacggcctattgtgggactttaccttgtgatcacgtgagtcattactccttaataaactctactttatatatacatctatcctattaattctgtccccctaaagaaccctaatacatatatagagactagactccaatttttaccttctagacactactaacctttcagaagagttgctcatcttctcggagtttcagcaatctcctctaaaactgtccctactgaaaaggcagtcctcaataccaaactcacttcttgtggctgttttcctctggaatttggtcctgtaagttttcactctagctcctaacagccatgagcagatgttttttacacatttaacaagtctttctagttatcctcagagaaagaatgacttgtccaaataactagccctagcacagaaatcaagaccattttaaaaaatattaggtcagtttgtctattttactgactttttttttaaagaaaaaacttgtttattacatttactgttcttttggtctattttctatttcattagtctgtttatattctcccttagaagtaacttgaacttattttctggctgtctaaatgatatttttctttatctttacagctcaaaaattttattagactatgttgcatgttgaccattctgggtccatttttccaggtagggttgtgccattttaatatgtagtcattatgcattctttttaatgacaggagactttttttgaattagtgttttattattaatacttattctcatcaattgcttggctttctttttaagagaatttagttatacatgtgtttcatcatctttgtcagacatctatacatttttaactctatttgtcttattccttaatatttttgatttcccatattatgctttctgttgtgtttatcctctgatgtgttccctgtcatttcattttaattttagaactcttcatttttctaactttttccaaaatatgccactttttgtttcacagatttgtgttgtttcatcattttatttctgatttatactgctctttcaaagctttaatcatttcaaacaaaaaaatatagttttcatatgatttgtcagtattttttgtagttacttataatcaaaacttttttaaaaattttcattctttttcttgtgataaagttgtgttgggttaaatctttttcctttttgtttcattttacaataagatagagattcttagttaattaggagaaggttcctgcaggagaggatgaaatgagtatatttttccagtcttctcccttgatattaccttcaaggactcgacatttagcccatctctcagagctatatgggattgaactgtatgggcttccacttctggccatgtgtttcctagaacactgttttttacattctaaggctgtgcgtgttgtattttcttttgcagtatttcataggatggaattctctagggcctcccctggttcccgagccttctctgttactctttgtattctactctggctcaatttgatttctaaattgagccgttcccctgagagtgagtctctgttcttctgaaaggagtacttgctgagtacttccactatcttcaaggacatagaccatcactggcctgtgcaaacattaccagccactctaatggccttgtgactcatctccaacctagacctcatgcagttctatcccagtgttgtgaggactctaagacacaaagaattctcctctgcttttggagatggggacccgttggttatttgcagttttctgacactaccataaacccaacaggctgaccccttctactgccttccacctctgctgctggtcctgttgttgccagtaatccagttgtgttgaaggtgccatccatgtacttttttctttgtcatcctattttatctgtgttggtttcaggaggagtttggggtcaaacaccaacatgtttccaccatgacccaaactccagatgtacatttttcagtatatttaaatctaatttaaaatgaaattaatttctcttttccttcaaagcttgacatgttagaaatgcattctgtattcagtgtctacagtctcatcttttagcattaacaaatttcttcctcaactgctttattaaaatttcaatgacaaaaaatattgagttattttccacatatggtagactctcatatgagcctttttgtggcatgtgactctgtggacccctcccttctcctggcatctatcacctccctgtcttcatctatactgttagtcctgaatgctcagtcttattccttggctacttttcggcaggtggcttagtgtatgatattccctggctggattatacattgttgctctcacttttccaatgctcactaggcaatcctaggactcccatggtgacaaaatgcttgtgactacttctgtccatttttgaaacattagtgaatcactccaaaacaaaaaatgaacaaacatcgtgggattaaggaaagtaaacttgcctttccaaccctgagagatacatttaaaaatcaacacttgatgattcagcatgaagataaaaaaggtcacctgaaacagaaagacgggctcttagatcatcaccacttatgtcatcatttggagggagaaatgcttatttactaattttgcgaatcccaaattaattttatatcaggatccccctcctacctcgaatccttcccctttcttttctgaacatgccattagaaaatttctctttaacacaaagaggacgttttctaggattttctgaataagcagaatattgtgctctccttaaagctatcatggactaagatgatagttattattcattttctaattcatttttcccccaaaagacatgataactataaaagcaagggagaaaatagcaattgacttgtaaaagaacagataaagaaacaaaaatacttgcaagttcaaaggaaaactaatttaattctgacttgtatttgtgctggaccttgaaagactattggctattttgaagatgtaagtgatgaagagaaaaatcccaacagtacattatcaaggacaaaaagtgggtgctcaggcagtgatgttttaaattattccaatgttcaacaagttcccttcacttcttcccataaagcattattacaaataaggtacttctcaaatattgatagcaagcaacctttggtcacttccatctcactattacaaccttataggatatttaccacaggggggcaattttatattcttcagctacaaaggcaaaggttgggtattttgtatttggttttataatcaaatcaaatgcaatttgactgcatttgagatggatatttgggatggagatggatctttcactcctaatgtgctccctgaaatgctaacgcatcattatgtgaatgtgtcaattactggtttgacaaatgtgaaatctgtatttctatgaaattgtactcatattcatttaaaagagttttaaaattcctaaaatattttggaaaaggaattgaaggctccattttagtggcaacactccacaattttgattgagtcgtctcaggacactaacaaagaaatagcagacatagcagacagagtcttgataagtttttacctgatacaaaaagtctggcgctgttgctctgcctcgtctctccggtgtatcgatgccgcgtgatgcagcggtagttatacaatccatcttcattctgtacatctttaatatacaaggctcccgtggatgtgatgagaaatctagatcctgaaatagaggaaaacagtggcttggttaaaagacaatgaaagcaacccaaccacacagacaaagtccttaaacagttttttttttcccccacctgaagaaacttaatgaaaaggctaaaaatgggtgcgtgcgtctgcgtgtgtgtgtgtgtgtgtgtgtgtgtgtgtgtgtgtcaattaagggtccaagctgttttaattttttgactagcctacattaagggtttttagtccttatgctatacaataaatatatacttagcaaatctaacctcataaacttttttttagatcatgcatttatcttacagcaacgaagttgtcatataattggtatataccgaacacagaagattttcttggatcattacatttcccttagaatgtgacaaattaagggaatattaactttttgttgcacatctctagcttatgaaagtataaacttttgcctcagtttaaaatgtttcaataaaagcacaaaaatattagactacaaagcaataaaatattctacaaacttcccctaaaaaggctgtcttatttcctcacattaataaccaatatttatcactatattctatgacacatatcaattcttcccagattcagtgttttagaatactctgttatttcttaatcactaatttttaaagggactgttcaaatcactaacaataacaattttcacctcaagaaaaaaaattcatgatcagtcattccccattatgtcagcacaaaacaatgtcctatctgtaacctctaatttttaccggtaaagcttcagttgaacagaaagggccaacattgagatcaaatatcagtgttagtttaagagggcaaaaatgtttttttccctttgaaaatgtaacttttaaagatatttttcgctgttcaattttaattggctgataaaacaagttggagcataaaggtaaaatgtaaatgatcatcgtaagtggattctataatttccctaagataataaaatttctggtcttttactttaaaaaaaaaaaaaaagtagagctgagagtgcctcattgcaccttcccggtgggtaactcagtacacctcctgccaccgttagactcttctatgggctatttctgcatgtgatgtgattccactagaaagaatgtgatttttatctttgaaaaaagactaaaatgccaaataatcaacttttattgcttatttttctcaggttcagttgaaacatcctttagtttatttcagtcagaatttccaggagtcttagcttcattgcttttgagctttacatatttaaattgtaaagataatttcttggtcattttctgcagtaactacacatcatgcataggtcagtttctcagataaattaaaaatggtttatggtttttttttttgagataaggtctggctgtattatccaggctgtggtgcagtggtatcatctcagctcactgcagccatcacctcctgagctcaagcaatccttccacctcagcctcccgaatagctggaactatgggagtgggccatcacacctggctaatttttgtatttttttatagagacgagatctcaccatgttgcccaggctggtcttgaactcatgagctcaagtgatccacccgtcttggcctcccaaagtgccagggagtgtaatccctcccaaagtgggattacaggcatgagccaccatgcccagcctaaaaatgatttatgaattatcatgagttaggagtaattccaaagaacacagatgtgaaaaagatcataaaataacagagcaaatactgaccttgtataagcttttcaaaggagcgcaaattaattattaaaggtagtataaaatatctttaaagtaatatctatattaactttccaaacaattccagttagacatttagtttaaaatatgccataaataatgctagctattagagaagctgaaaaatctcctaatgctgtatattccagataattttgctttattattccccaaaatgaaagcaactaaaaataccttttaccacttgtcatgtgtcatcacacaccagcctttcttatgatacacattgtgtataatggaaacattatttctctttcaatatattttgcatacttacataatgctttaataatcagttcctttaaagtacagtttgatagacagaaaggaaagtcaaaaaaaaaaaaagatgatgtatgtaattcctgtcaccttcttagcgtggagtattttcattagaattgataggccatgagtggtggcaaaatacaagtgggaaggattttgtgtgccattttccagaaaggttgagaaatgcacacagatagcagcagcctgcattattactgattccagagagggctctattctctaggaacattttgttcttgtaatatctaacatttttttcgtttacccacttacgttaaataaggctttagggcgtatcatttcagaagaacttgaacctttgattgtcttaagcattttttgagatgtttacaggaatgaaggagttgacattaactgagtttctgtgcgtaaacccatttaagcctagcgtttcattattggaacgctaagcatgtggcaattatttatttcctgctgctcaaggtcattgccaaggtctgattgcaaaaatttaaaaaattgcaacctcaggcataaatgggttaatttgacctcctttgtctagtccttcatttctcaatttatctcatcttgaaattgatcaacattttaaaacataaaataaggttgaaaagtaggatcttttaattatgagaggaacaggtaagtccagggtccttgggtacagtctcaactcaggagtcctgtggaactatcaagggacaacaaggacacagctaagtcattagagcaccaaatatgtcagccctgtggtaacaaggaatcattttaactgctccctaacttgccactgtaccccacttgctaccttatgccaccaaaggtttccatgtcatatggattaaatggtttgttcatgtccttcaatgggattaatggatgtgcttctgttaaaataggcaaatgtttaaatacaatttattggcagcaaaaagtgcaaacacacaattctgtctcattctgtctccctttgtgtgtctttctgttttattttccttggaatactattagcattttaaccggacacagttctaaaacatagttcatactttttgtcatgttagacacactgcaatttagagcctactgaacagggaatgatttttggattttgagtcatcattttggacatcgattattgagccatgctgctcagttaccagagggatgtctcagaagctatgtggcatctcaagatgcatggaatggtcccagactgccagatgttcaagtctctgagcttgtctttattagcttttctgcttcctcctttactatccagctgttatatgttacttccctttgttatcagtatctttgtcaacacacagtgtgatgcattcagtatgctgagagttagaaaacagacatatcaaggcttttaggactttgtataaactaagagtaaataggttatgagcaagtaacatagtggttttccaacatcagttaacatgagcttacatgttagtgccactaaaataaatccagcgcttggtgtcagttcagtcagcctggttaagattagcataggggccagtgggatatttctatgtagggacacaaaactaccaaagaaaatggggcattagcccagtaggaaaatgttgcagaaaccctcagatttggagttctacagccacgttcttcccattgtcacggagctgagccgcaaaaaacactcatagagcagtgggttctgaaactcaggcacaacaccattttgggttttcttcaaaggcagatattaaaatagcagcagttctagaaatctattttgctgaactatgggttgttaatgctgaaagtcagatctttaagatctgagccgcagaaagcaggcatgcatgatctccagaaagaggcacatcagagttgattctagaaaccagcaggtgttataggtggtcaggaaacagagccaagtgatgcacccattcgttggaccagcactgtcctaggctccagaaatgcaaaaaggagagagacagcccctatctctagggagcttataatctaaacagatttgagcctttgggtttaggaacatcccaagaagttgaggaaaaaggatagaagggaagaacctggagagcaatcaaggaagtggcattgtccttgtctccctgggatgaaggggctactgatacccagggaggaaaactggtatttatccccatacctgcttttatccttgtgtgttattctaatacaaatacttaattttatatgttaaagtcctcatcattaatgtgcttgttcaatcttctcagctaactttttcttgttcttatgaagaatcaaattaaaagattttccctggtttgaggtgcaataagctcatccactttgagagatttctcagtgtggaagaaaaaacctgggctttggaagccagtggatctgaactacaaaacggtccttgtccctttccagctgtgtggcctcagtctagtcatttaactctaaactttgctttcttcatctagaaaaaagagagatgatgagtaatctctttgttctgctgttgaagatcaaattaaaatgcatttatgtcatctagcagatagtcatgcatctactgcacagcagagtgactaagctgaataataatgtattctatatttcaaaatagctcagagagtaaatttcaaatcacaaaaaaagggataagtgaggtggtagatatgttcatcatcttgatgtaatcatttcacatcgtgtatacacataggtgtgtatatatagacacatacaaaatcaacacattgtacccaataaatgtatataacttttcaattgaaaaaaatattaataaataaaaaattaaattggtatctatcctagtaaatgccatgtttgttattctgctgttctggacaatccacaggtgtataaaatgtagcctttgtgagccagacagggaagatcccactgacataaacatagcagggccccctttcaattgcttgtttgcttacttatgaaaggcaaccgcatatattaaagaaagcatctgagtggtaatgatgtagatgaattttacatcataattctgccatttggagctatttcaccacaggcaaaatatttactaaacctctgagccaatgtcacatgacagagcattggtaaacatagaaagatatactgagtccatggagtatttttgtataccccagtgaaaggcttggggaaaggaggatcacagacatctgctatgaactgaatgtttgcatctgcacaaaatttatatgatgaattcttaatccccaatatgacagtatttggaaataaagcttttgggaagtaattaggtataggtgtgattataagggtgggaccagacctcactttctctttccgccctgtgggatcgcagtgagaaggcggctgtctgcaatccaggaagggagcccccatcaggcaccaaatctgccaataccttgatcttggacttcccagcctccagaacagtgagagataaatttttgtggtttaagcctcccagtccatgctattttgtgatagtagcccaagctgaccaagatattatcttcagaagtcttttccacagtagaaatggatattcacagaaactcagggactttccccaaaatcattatcatgttacttgaacaattctccctggcatatctgttagtatctgagtataaaaaaaatatcctgaagttctcaaaattaatcatttcttgtccatcatattttatctaacaggaaggccctctgcttctacctccaaaatatatcctgaatccatccactttcctccctcaacactgtaccacacacatctaaggattgtagctttcaaactctctgtgtccacttctgcttccctacaatttaatctctattcaacatgcatgagcatttagcaatatacatcatttagtgccttgatggaatcccactagacctaaccacttatgatggtctatgatagtttgggctttggccatatctccaaaagcttccactccactctctccttcttccaccatacccaggccatgctgtacttcttttaattgctctgactggaggctctgagcccagatctctccctggatgggtccttcttgtcatcctggcctcagtttttaagtcaaatttccagcaaagtcacatgatcatggtcattcatgatgagagacttggttttattatacctgtatgtgacgttatcttgtacatgtgcatgagattggtttaacatttccctccttcatctagaatagcaagaactcattttgtcttgttcaacatttcatctccattacatagaacagtacttggctatgacatcctaaaatatttgttgaatgcatgcatgggtggatgaaacagtctattattgcttgtattcaaaacatcctttcctaggtctcagtaaaaagaaagctaaagtacctttttttagatttcggcacatttcctcatgtagactgcataaaaagagtttgttctcctccagagatgaatatattcttatatgaaaatgagcatattttaagattgtgatgaattattctttcattatgctccctggctttttactgtgtggttaagctgttagatcttcagtaaaggcaatactatttgggggaagattttaaaagcatatgtcatttttcacttagagaaatatatcttagagctcttgttgttgtgtttttcctattgcagtctatatgaattgagttaatagcaattgaaagaagagatggctctgctaataagatgttaaatggtagcacaagcacgatgaagcttttctcagctgcgcctgccgtcgccaattgatggccacactgtgtcatgaaactcagctttcttcaaagccgtttcaataacagtttctgaaatattagaggaacataagaattaaatctaagttctaagtatatagcattagaaaccacatgatcctcttagcattaactaaaatagaagtggaaatagaagatatatatatatctatatcatatatatcttatatagatatctatatatcttatatagatatctatatatcttatatagatatctatatatcttatatagatatctatatatcttatatcgatatctatatatcttatatagatatcgatatatcttatatcgatatctatatatcttatatcgatatctatatatcttatatcgatatctatatatcttatatagatatcgatatctatatatcttatatagatatcgatatctatatatcttatatagatatctatatatcatatatatcatatatatcttatatagatatctatatatcatatatatgatatatataaaggattacatgcaggcatgaacgagctacagatatttcctgagcaattgagttgccagataaaaatatgcacatgttgaaagctgcatataagagaaaagaagagccccctaaagagaagacatctaacctgacgttatgagctgaatttcccccttcctcaaaaatttatgttaatgtcctaacctgcagtacctcgggatgtgactttatttggaaatagggtcagtcactgcagatgtaatatcttaagatgaactcatacttggatagtgtgtgcccctaatccaatgtgaccggtgtgtccttataaaaagggaaaatttagatagagacatggatattaacatgaatcctaatcagagccaacaggttctaggtggaggctaccactgctttcggcattatttatgttatgacacatttagttcttacaatgaccccaagaggaagatactgttattcccatttttcagatgagaaaattgagaaacagagaagttcagggacttgccccagtttatacaactagaagtatctgtgccaggatggtgccctggcttgctggctcatgccctcacgcaaatcgctcccctgggtttgggccatggcacaagtgtgagacggcaaggcatgggcaagcggaggtacaaccagagtggggcagaagccatgagcacagaaagaaatttaacctaaaggttcaacagagctggggtgaggagaagaagatgccaggtattgattctgagggacctatggggttggggtggccttggtagaacaaaggagttggggtaggggagattctgtttcagaaaagataagagctcagctgtgagcatgctgagtcagttaaaatcaaaaaagtcaagctgcagacagggcgttggagaccaaactatgcttgttgaggagaagcccttcatgagaactgaagtttagtaactccccaggaaggggagtgaaggaaggcgagtgaaggaagaaggccaagaaaagacccaggaaaggagtgagaggaggcatggaggacacaagccagtgtggcgctaagaaagccaggggaggagaggacttctaaaggatgctgcaaagggcctcagctccctgccttcctattgccatagccttgagtacatatacaacctgtacaaaggggcaatattgcctttttgggaaaatcatgatattaaataagaacatccatgtaagaacctgacagagaaaagcactttagagtagctctaatctgtaataaaatatgataaaatattcttgctgaaccaataaaaatattaagtgtctaagagctagaaatgcacaaaattgagttaaagaacactccacgtcattaccaaatgacataatagaagccctggataaatgaagaggcatatccaaatctaggattagtcaacttaatattgcaaaaatgtcaccttttcacaagtgaaatgaattacgttttaattaattgctgaacaaaatttacttagaacttgaacaaatcaatgtaaattaaaatgagagattcttttcatacaggagattagaacaaaaaataaaatgtttgaaaataagtggtcttgacaaaaggtatgggaaataaaaacctctataggtgggcatgtaaattggtgaagccttttgatttttgaagggcaacttgccagtatatttcaagtgtgagacttgcatacttttcaatccctcttgcaacgtcaaagattatcctatggaaaaactcagaagtgcacactttgacgttcacccccaaatgcacggatgcataatttaacaatgaaaacttatttttttttttttttttttttttttttttttttttttttttttttttttttttttgagacggagtctcgctctgtcgcccaggctggagtgcagtggcgcgatctcggctcactgcaagctccgcctcccaggttcacgccattctcctgcctcagcctcccgagtagctgggactacaggcgcccgctaccacgcccggctaattttttttgtatttttagtagagacggggtttcaccgtgttagccaggatggtctcgatctcctgacctcgtgatccgcccgcctcggcctcccaaagtgctgggattacaggcgtgagccaccgcgcccggccaacaatgaaaacttatacataaacctgaatgccaatcaagggataaataagtaaataaattagggtacatctatactctgcagttacataaaagacagtaaggtatatgtacacataccctgcagaaaaatctccactacatagtctaaagtggttacataacaatctgtaatgttatgtaccaaaggcagtggtatatgaataaatttgtgtatgcaaatgaacagagaggcctggatcagcagatatctgcccaaatgttaactgtggttgcctctgaaatcatgagtggattagaggaaggggaggagaaattatgtttcatttcccactgtcacgtatttgagtatcttaaaagaagactctattaatgtgcttcttgggtagttaaaatgtattttggaaaaagatgtcagtgggtggtgagcatatggacacagtagacgtaaaccaaacccatgtaacacacaacatagaaggagataaatttaggatgatgttgctgtcgggagtagatgcgtcaaagagggcttttattatgcttgcttttcaagctggtcgctacctggacttgcctaaaagcagaaggggagactttcaatattcaccctggtctttgtattccctcccctccaaatacctcacacaaaagttgaatctgccatgtagctgatctctgtctcttcctgaacttctgtgataattccccatttcacacataattgcatcagtccagttgatttgggtgtcagagctgcctcctcaaaatggcagttgcctctctgaagacaaagggatcctcttgtttgccccacttacctgctgcccccaaaggtttgcacagtgctaaattaagtgactgtttagaagatatacatacttcgagtttttttctaaaaataggatcagtaaaataagggatcatattgagggggcagagctctcaccatatcattttatttaaccttctttggagcctattatgtttatgagagtatcatcaagatatccaagaaataatgaagccccagcgtggatcttgagccgcctggaagaaatcatttggctagaaataacaccatcacatggggcatgaggaataagcttacaattctgctggatccagtatgtaaggagagatttggtgtacatattttaaattctctcaaagcaatttcactaagacatttcttttatgtaaataaaattctctcagtgaaattctcctgcagttaaatgaggctcaattatacactactaatttaagcctgcatactgcattccaactgtatacctaattaccctatttagtttgttaatgatcagatctttgtgcagatattcaagtctgtcactaatctttgctctagttagatttctagttgtttaaaataatgaatccttagaaagaatataattgtataattcctttacttttaaatgaatcacttcaagaattttttattaaagaaccaaagaagctcgtaaaacttataaattgtatttatttatttatacgatgaacaagatggttttggccactgacatttgaaagcaaatatttcagttgggaacacagacaaaaagagtacattgacaaagaaaataaatccactctcataaatgcatttacatgaattgagaaacagaagttgactctagtaaagagaagagctgtttagatggtgggggtttggagtggggtgtgtatgtaaggatttctgaggacgtgcacttcagcagagccacagaaggtaggaagataagaagggattattcatggataagtagagctaagaacaaggttaaaggaaaagtatgtttgaggcgggaaaaactgtggcatatccaaggaactgacacaggatatggtttgaaaatagaactgaggccgggcgcggtggctcgcgcctgtaatcccagcactttgggaggccgaggcgggcggatcacaaggtcaggagatcgagaccatcctggctaacacggtgaaaccccgtctctactaaaaatgcaaaaaattagccgggcgtggtggcgggcgcctgtagtcccagctgctcgggaggctgaggcaggagaatggcgggaacccgggaggcggagcctgcagtgagccgagatcgtgccactgcactccagcctgggcgacagagcgagactccgtctcaaaaaaaaaaaaaaaaaaaaaagaaaatagaactgataggacatagaactcgcctgaatgccaggatgaggcaaaggcgatgaggaccaaggtggctgctaggtcttggtgaagagccctgaacaggtgaagagtcctcctgccaggaataagaaccacggggtgtggcactggctgtccatggctgacttattttggactttggggaattgaaagtagccctttatagagatatggaaaggggaaggaagagaatgctattggatgtgctcgttgtatcaggcggactcatgtttagaagaggtacatcagcattatttactgtcccacaagatttctgcattttggggctggaagggaatgtgtatttcaggttgactgtctgttccagttgtgggtgcacaatacagtgctgattaaaaagcaacacatacaaaaaggaaaaaataagtgaaggaaggtcagagcacggcacttcaacccacagtgactatgcttacctggtctgtgttagcaacccaaaaggaatttaagacactgggcttattggcaaaacacattgaaaattaactgtaaagtttgtctacctgatacagatggcataggattatgggaaagaatctggaaaaataggaaccaccataaagaatgaaactaacactatgttgtggccacttaatattatgggataatggtttttcacactttgggttcacctactaataggttgtgaaatcagtttcatggattgcagctttactttttaaaaaaatgaaataaaagagcatagaatgtatcagtgtgtatcaaatagtggtgataaatattctgcagcttgtttcagtacacctgtgcatacataaagttatgtgtgtgtttgtatatttatgtgtgtatttatgtgtatgcattactgagttctaagataaaatgtctttattctatgtatctcttactgtgagtcagagcaaaaaatgtttgaagagcctttttcaacatcttagtgatggaattgttacttttctgactaggcttccgtttcaaagcaaggctaatcgtcttttagcatcagctggtataccttggattcttaaagttctctctttaaatatttctgcattttaaattaaagattcctgctttagcaagtcccctagttcttattcctggtagggggactcttcacctgttcagggctcctcaccaagacctagcagccgccttggtcctcatctcctttgcctcatcctgacattcaggccaattctatgtcctatcagttctattttcaaagtatatcttgtatcatttccttggacatgacacattttttcccacctcaaacacatgctttgagaccagcaagtctataaggccataggcttggttgcatttataatgggaatagcagagaaagcagtttatttttttaaaactgcaacatcatttgaaggtcttggattacatttgtttcccaatgacacgtgatgatgtcaaaggaaactataatgagtttactgagctatccatacaaatgtacatgcaaatatgtatacttacaagaacacgcaagggtagaaaccatgtcagatgcggtccctcgtgtcactcccactccactgccttttggtttcaaatagtctgaccccatgagaatctttgagactgtctttcatgtcacagagccttgcactgtgagagtaactcaattccctaaatgacttccccagatctagcttatcacaaactccattgccttgcaataacctttgtaacaaaatggtattaataaaatcatgtagcaactgcccatcatatgcagacctagtaatggaatccaagttacctaaaaggctaattcctaatgagaaggaaaggaaacataccataaagtaaaagtgcaaacaattgcaaaacagaggcaaacagtgtcagttggatatacgtaagcgctgatgtaaagagagattggaaatgatatatctggctgggcaggtcactcatgcctgtaatcccagcactttgggaggctgaggcaggcagatcacctaaggccaggaattcgacaccagcctggccaacgtggcaaaacccgtctctactaaaaatacaaaaattagccgggcgtggtggtgtgcgcctggaatcccagctacccaggaggctgaggcaggagaaatgctggaacccgggaggcagaggctgcagtgagctgagatcatgccactactgcactccagcctgggtgacacagcaagactccctctaaaaaaagaaaaaaagaaaagaaaagaaaagaaaatgatatatccatgatgaattaaaatggagtggaacccactgatggtatgcagctgataagacgctatagagaaatgatatccggacacatggtgagactttttctcctctgtaaatctcaattcttgtgattctttcaaagggaaagccacagaaggtaccagttatccactcactgacttaggtgcctccactagaattctcagcacgtttttgcagaagtaagttatcttcactattgctctaacacttcttagtctcctttttctttcttttctttttttttagacaaaggaaaagtaaaccgctggtttagagtctttggaaggcaattgtatctgactagaatttaatattattgtttttctttcattgtattgcatttatctgtatggctagttaaactgattttccatttaaaagtagtaatgcatttttttataattacattgttttaagtaaacaagaattattcaaaggacaaaaacactagcacagatggcattcaatgattgcagatatcataaagatagttcatgaatgacaaagatttgagaagtactgtgttcacgatgcttcctggaagaggtgggttatacagtgtttcttagagaaagggataggggtctactgctaggagggaaagatgaagctacttagggggactaggaaacacgcagttggcctgccctctgcttggagatcacagccaaggaaacacaggagaggcaccccctggaggagctccgtgggctgcagggctgacgtggcccaggtaagtgggagttcagggaggcccacaggttggtgctaggatagtggcagatgattttcattgtcagactgtgagacaaaaggtagacataagggaggcagaggtgaaatcgggatggttaaaacagagaatgctgagagcagagcaaggcagttgctaaagctgttactaaaactggacagcagaaggcctggcgtggtggctcacagctgtaatcccagcactttgggaggcctaggtgggtggatcatcagaggtcaggagttagagactagcctgaccaacatggtgaaaccccatctctactaaaaatacaaagttagccaggcatggtggcccatgcctgtaatcccagctactcgggaggctgaggcaggagaattgcttgaatttgggaggtggaggttgcggtgagctgagatcgcaccattgctctccagcctgggcaacaagagcgaaaccccatctcaaaaccacaacaacaacaacaggacaacagagatggacgacggatcgggaaagccaaccagacagcgtgaggccaggacggaaagaggcacagggagctctgctcagtgtcgctacaggggatctctcaggctcacaacgggccactcctctagggaagttctggtctcatcatgatccttgtttggtctcactccccatgtccttctctgtccctcctccaactgccatttatttatttaactgaaaaagtaccaatcacccacataggcatgacatactcatccatgtacccatttcttaaaattgatcattgttaacatttggtgtaatttgctttatttatttttaatgaaataaataaaactttacagaaaatgctttatttttctctttgttccctccccatcctatatttttctcctaaaaaaccctattatcagaaatattagtgtgtattcccagtttcgactttttattttattacacacacactcccacacatagctgtgacaatgaacttcacatagtatggttctgtattttctctttgtttttcaaacttacataagtattttactatttctcatggaaaaactcacttttcccatccaacgttatgtttccttaagatctctctatgttgatataaagaaatctagctcattctttttaatgaaaataaagtatattttatgaatgtaactcatgctaaccatggcaataaaagctccatcaagcatgcatttagttctgtattttgttcaatgctgtattcccagtccctagaacacatacagagtagtggttcattaaatgtttgtcaaatgaatgaatcaatgaatccactcatttcactgctgacaagcagtaaaactgacgtcaattttgcacaaacttttacaagattcctcggcacccacataagagacgtactaatacgtctacctagaaatatatgtattgcattgacagaatttgtgtttttggttttgtgggattctctgaaatgctatgtgacttcttaagggcttggcacatgctgtaggctgttaatgtggctgaggggtttggctctcacatgaccactgcagacaggctgtgtgccacctgctcactttgtaagcttctcgtccccctctgacagctctttgcaatgctttgtcttttcttcaaaactttatatatatttttttaagaagaaaaatctgataagcctttgtcagaaaaaagtgggtgaattcttccaagtaataaaataatgcaaagtataaaataaagaggataaaccgattcacagctaggaatacaaggtatctttggccaatgggattttgccttcgtgctttcaagcacagtcactttctgtgcaaggttgtaagtgttcaccatgagctttaggtggatctagccctgtaacaacaaatcactagtaccgctggatcaagattagtgtacatttgtgtttaagcaatatcatggtccattaattacgtgcactgcaatttaatggccttgcagatcttaacactgtgcttttatttcatttttgcctaggcccgcctcaccgctaaatataaatggaatgaagcacttgaaaacaaaaagtataaaaatgtgtatatttttcattgcaaagcaattcttaatggattttgtaaactttgcaaaattaaaaggaaaatactgtcaggacactaagcttcttcccaggttttcagattccgaagctttagttgagggcagttgaagaacctacaaggctgttccggagacctttgtgaatgtgaatgaacgccctttgcttcaaaggcacctgcctggtgctgaggaatcggccttggagccgccgcccacgccgggccgctgcgggagaacactcggtgccccctgctggtcagaccgaggccccgcagcgtggcacagagagctccacggcacgcgtggtgtgggaactgcaggctgaaaaacgctcccagaaatgaaatagtgagtgcccgtggatctggcaccaccttaacacttcctcgttaataacacatgatttttgctttattaacctataagcacttcctatgtttacacttcttgggttttgatagaaactcgtgatcagcaaaattctttcaatgaaaatttgtcaaattacttctccacttaaaagtggaaacagtgacgtttttcttgaactccacgtttatttatattattttttaatttcatttttgctttacaaccatctaatgaattttctttagataaaattccctctaggattttaagataaaattccctctaggattaagttttggtcatttctctcatgaaatgtatgtcagattacattatttggaaccttatttttccatttttttttcaggtagtttaatatagtcagtgaatcagcagtgagttgtagcaacttccatttctgactatgtaaaaaactaattattttgaaaactctccaggtataagaaacttagacaagctgcataaatctaacattgacttaaatgaacagcaggtttctcaggtaaggaaagccctctgggctctataaaggaagagggggggtgaatacctaacagcaaagatcttgttgatactacctataatttccctgtgacatttgcacatttagggggaaaaaacatagttttaacagcaatgaggaaatggaaggctgttagtcctacacaagtcctacacaagagaagtctgcagaaaagtacaacttcactaaaagattggacctccaaaaaaaaaaaaacagcctttgcaaatacccttgccttcctagcctaagctttgtgtagggattatgtctaaccatagtactggccttgctctggtttgggatttgtagtctcactgtctccagggtccagtagacctcactctagaaaataacatatagtgacttcgcttctaaggacatctggcagaagcaaagacaaataaatcttccctggaggaaggagcactgagaaatgtttacagatgaagcttgactcctcccttccaatcttgagcttccagtaccaaacctctaacacattagagaacaatttatcataaaaaggagtcagaagaagcaatagaggcctcagacaatgaaataactcgacaatgtttacacaataagtattttaaatgttgcaaaactatagaattgaattaaaaataggataagtgaataagagtatatcataaaagatacaaatattagataaacaataaaatatttgcagaatgggcagaaataaaacacataacccttgacataaatatttatattagacacagttgggaaaaattagtgaacaagaaaataaatctacagaaattactcagaatatttcctagagagaaaaagaaacatatggaagaaagaaagatacatatgaaagaaaggttaagagacttgaaggagagatagaggaaatccacagttcaaggagagggtagaaaaaaatggcagaaaagcaatatttgggaaaacaatttggaaatttcccagtattgataagaaccgacagtttgccaatagcaggcttgcgcctggaactaaaggatgtgcttccagaaaagaaattgtactcaataatgagatgcaaaaagaagggtggagaaagaacgaggtatgcgtgagtaaccctaaacaaataatgactgtataaagtgataataatggcaaatatgattgatataaaaagttagatgcctctagaacactggaagacaattgcatttcagatgggagggagatcacagcagatggtatcatgaagtcctgtgtttctcggtatgaggtaggtcagcgtgctgtatttgtgggtgaagaaaagcaatctctttagtgcttttgacacttttccacaaattccatttcacccacatcttaacctggcaggcatctctttactgtttgagaaaccagaccttgctctttacagtttccataaggctgtcatggtcattactctatttaatcttcataggaaaatcacgggagttaaggccattttaaaccccccctcctccactgataaaccagctgtgttctttgaaaatatttgatacaactctaagcactgcaaacttcacattctggaaagtgtgttcaatcctactaaaacctattacaatccattcaaatgcacataccctattggagtagggtggtataaattcaccactctgggtaagcaaatcttgctttttaatttcattccctgtattttctccccacattttcccacttagtaattgtttataaattccaggtagaacatgctcatttcatgttggcttttcttagcaattcttacagtaaatgtagtgtacagtgtaactaccctgtgccatttagaaatgggtgggatacaatatggtaagtttactctttccctcaatgtaattcaacatgtatttaataaaagtaggatattcctgcataaaagatgaatagaaatcccccgtgttttaagataatttgctctcttcttgagagtacaaaagggttttctccaatgtacattttgctcatttttatatcttctgataaattattctcatgtcatgctgagaaaacttcacttgtcatttgagcaaggaaatcaaaagtcattataaatgtctagcattgaaaccatctttctttcatttcctgacattaaattttaattagagaatattcttttaaatagccaatattttatgaagagaaataacaaaaaagaggaccgttaaaaaacagctaatgttctaaaaaagacatctgattagtgggcaccacttctttctggcacattccaaagatatccactgtatttggccagtaccacaatagattatagaaaatctatgctgaattaccataataggatttttatcattaatactgtccaggtatattgattaaattatttgttaaattctccaaatcattttaaccatatgaaccaagttgacaaagagcttaccatctaaaacataaagtacatcagaatctggatttatctgactcaggttaatgaaaagagtgataaaccacaccctaaactcttgtctttgaaagaagatatagcctgttaccatcgcagaatggacaagtactctcgagaaatcttcatgtacactggccgacttgtttgcctgcattgcttcctacccaatggccatgccacgtgttcatgcatcaaggaagagaaaacttaagaacacagatttgggaaggatgcaaaagtgagagaacaggtgtggacgtgaggacacggggaataaatgagaaagaatgtatcctaagaggacgtattgtgtggtcagagctacaagtctgggtgtttcttctcatcaggcatcattgagaataagcctccttggtcacctgctcatcctgtgtctatccattcccccaccaccccaccctgtccctttcaaatctcctggagggggagctgcacgcatggacagggtggggcaagggagaggctggagctgtctcagcttcgttttgcttaatcaagcctcctttgactatgcttgcccagttgcatgtgcagtggtattcagacctgctcagcaggtggatgagtctgatcttagtattcaatcaaaaactacatttttgttcttttgactcttcttcactgcacaggggtaaaaagtgtggagtctatcagtcagctgttagacagcaaccattttagatggatccgtaatagccaatcaagagatgacaatctccctttaaaaactgacaggtacaaaaataagacctgaataattcatggagagaaggtggatagccttgggttagctgattgctgatgcaccctattccgtgctgtgctcttggcttcaccttctgatgtggcatccacattattttcccagggctgctgcaacaaagtactgcaaaccgggtggtttaaatgatagcagggtattcttttccatttctggaggccagcagtattattggcaggtccgtacctactccaatgcctcaagggaagatcttcccttctctctcccagcttctggtaggcctcaatgaccctggattatggcagcgtaattccaatctccacctctatcttcacatggccatgttctctctgtgtttaagttttccctcttcttacaaaaacaccagtcatgttggattaagggcccatcctactccaatacaacttcatcttaactacttatatcttcaatgaccctatttccaaataaggtcacattctgagccactggcgcattagagcttcaatatcatttgaggggacacaattgaatctattataacatctcaaagcagctcattccttgcctacctcaggtagcaacaagcttaaaataaaagaaagaaaactgtatctatggttctttgcaagtgtagggagtggagggagaccttctcactatggaaaaatatttcaaggtatataacatttcatattggatgatgcagaccgcatgaaatcattgtgctccttaaacaatccctgaaggtccaaccataccagcaaatgctgcaatataaataatattcacaaagacaggtgagagctattgccttaccaggggctggactcatggctgttagaatgagcagcaatgagtattctattcactcactttggctttaaataagaagccaattttacgcttaaaaatcgctgagtgcataaacacaaacatatagaaatctggagggaggctaaattttacacagtctacccacctgctgtttgaaataagagtgctatagttaatgtaaattacgtgcaaagaatgcagattgagaagattagagaaccatcaacttagtttgatcaaatgatacaatgtgcttgaaagtaatttaatacaaccatagagcatttcaatgtttctttctttggaaggggactttttaaaattttatcagtttcatactatgatttatccttctctccagggttgttcatactgtggagtttttctacaggttagcgtaagcttgagcagtgtcagtgacaggatgtctccccactggtgcatgatgatttctcctacagtgtcccacatagcatcaggtatgttcactcaatacatacttgctcactgcaaatatttagagaagtgtattaccacattgctgttatcggaaatttctcgttgcaaaaattagaagattgctaactacaaaaatctcattttgagtatggtatgttgacacaatttgcacagactaggcattagaatgtgactctgggtcatctcacacgccaggaagtttggctagccccttctttcttcccagagagaaagcacctctccaagggggaagcagatgtgaaaaagagcatggagttcgggctgtgggaaccacgccggtgaaatacccacctgaggctgagtcttcataaggtagttgccttgaccagtcttttcaaaagtcatttcttatttccttcattatctccatggttattctacatatcctcgtctggcatccaacacacatcttaaatctcatattcaaatattgggtaaatgagaggaattcctttattttaatcctcagtacttcctgaacatgcaaacctattagtactataaaaattaatgcctataagtgatatttatgtacaggtattaagaataataatcatgtattattctagtgtgggttaaagataaacagtgtttgataaatatttggaaaaatctaagagcaataaaacaagcctcaaatagtcagatcagaggttcatctataggccacactcttcctaaaatgatatgtattttttaaatagttataggatgagagtggattagaaaatggtactcctgtaaagcatatattttcaacgatttcctaagaaactaaccaacacgacgtagaaagtaataatcacatgaatttattgtaagtatccttcgaggtcagaaagaagggtagaacacaagttcttgtaacactggaattggaattccaggatggggaatgtgttatgtatctcagacgcagaagggaaagaagccaccacgtacagaacggtgaagcctctgggtctactcccaaacacgagcatttcccccaggtcctgccaagctctgcaagatgctattgaagagatgcttcccataaaggaccaaagagcagtagtacagtgaatataacctcagaagcaatgtccacaactcagtgaaatttttcaaagcatgacacagcttggccagagctccttaggaagccacaaggtcaactgttaatcatgaaaaaaattttaacacattcaaaagatataataaaatttacaattcaacccccaaatcaagtactaaaaagatcaatgagctgatacacatgtacagaattattagtgcatgttagatatcaggcaaattttgcttccttgacatcaagtgtaagcccatatttaatgcacgcagctccaaaggctggttccctaatatcggctccaaattgagaccacaaagtcttcttggatgaaagatttagaatgccctcaaatctaaagagtgcagacttaaaggtatactgccaaagaaaggtaatgatttctcagtctctcccacttcaaagccatacccaaaggctctggcaccttccccttcatcatccaggaatctccagatccacgtgcatgacctctgatgcggagcagcactcaatccataacagctccacgaacagggaatacatggatgagtcttcattaagatttaaacatgaaaagacatgttcccagcccttttgtgagcttgtgctttggaggagaaaatacaacgaaaattctagaaagccactttactaaatgtatatgtttttataggcatatttttttaaaatcaaggtaataggaaatccatattatcattttataaaactttaacttacatttttttctgactacaagtataggcacagtgtgaaaaatctgaaaaataaaaactagaaagaataaaatataaatcccacataattccattaccaaggatgaacagctgaacaccagagctgaccattattaacatgtttgcatatatccgtctatgcttttttctacatatatatagtatttagataattgagattaaactgttatttaaatagctttccattcagcttattttatttgatccttttatgagattcatgtgctcaatgaatattgtatgaatgttgctaaattatgagtggctacctgtcatttgaatgctttaatacatcattttaatactgtgtaataatccattggatgggtatataataattggattagcctatctgttcttgagtgtttctaatatttcaccattataattaaaataagtttccaaatagatatttttctgcatttctaattatttctttaatacagttctctcaaggaaagtttctgtggtcaaatctatactttttcttaaagaaagacatcaaactgataaattcatggaatagtcaaggcagttgttgggtggtttaatgcaatgacaatcttgtgggggtctaaatacagcagtgaattcacacttatctacttcacctagaatatgaagatgaggcgagataaagataagaacaatgatctttattgcttactacagtccaggcatttttcatattacttcatttaattcccctaaccctttttattagttgaatgagaggtctgagtttcagcaagattgcataggttgaggaccaaggtcatacaatctaggcttgcctgactcccaatgccacattctttcttccacatcagaccagatggcttttatacagtcaggatgaaaaataatagaatatgaacctgcactcaacaggctgtcagagtctctcaagtctccatacatacacaatgcatctgactgcgttttaaccgcttccagagccctggcagctatgtctgggaatgcagctttttgcttccctgagtcttcaaccaaggcaggtaaaccagaaagaagtggaaatgcaatattgagccacacaaaccctgcacagaagtatttacagaagagtgagaaaattcttcctagcagggccaagctatcttttccctagagggagccttgatcttgggctgaggttttggataatggatgaatatcacctggaagacaggggagagggagattttcaacactgagaactgtagaaccgaaggcataccagttcagacttggatcctttgtgtgtaattggggagtactaagagagattaggatagaaatacagacagtcttagatggcagaggggtttaaaactttaatcccaggatctttactgtatgttaaatatttcccaagggaactctaaggaaaatttataaggaagtaaaggtagaattaggtaatttttacatggttaatttgagtggtcaaacaatgtcgtttgatacaaatatactgtgttcagtcagtgtaattgacgaaaaacattggcaagattgttatgaaaattctaacttcaataagaaatgatagcattgtattttaacttcttcctccctttcctctcttggctggttccaaaaataatttgatgtggtgcagtatttttaacttgagaagagactattagggggcattctttattttattttatttttattttaatgaaagaaaatgaaagtcaaatttaaagacaagaaatttctgccttcaaaggtcaggtctatttttactttccttctgtatttttttttttcttttagatcaaaaatttgagtctctttggtatccagctgtaaaatgacgcatgttttttttcctacctggagactgtaacattttcctatattttaggctaaaagggttgagagcaatttgtaaattcattcttttaggaatactaaaattagttacaattgacttatgaatataatttggagatttgggtgtagattccatagttgccttcgcaaggaatgtatctttgatttctttttttttcttaaatcacaaaacttaaaaaaaaatcagaaatactgagaccttgctattggttttgttttctctttatattcatgaacacaaagaaaatgggcattaaagcaattttataaaaaagaatcactttccatggacaaagtctattaaagattttttagtgttcacagttcattttaaatttattttctatttggccctggagtcctctcagggaatggattggggagaaagacattggcattcacacagtgacagtgtgacctgatcatttatttgccaagccttattaaagcccctgaaatcactccctgccacggccctcacagcccatcagccatcagttcggaatgtcaaatctgattacagtgttctcctgcagcctcttccaagccttcagcaacagaaagctgactttatgcctgtgcctacggaagcgggtcccatggaggctccaactcagggcagctcattttgcttctgaaccgccgacagggttcctaaatcgagatgacatttaccattttatattttaattcactagagagattttgtttacttcctcttccttgctactatgtctcaccaaaagataaattcaaattccaaaatagtatatttagttcacaaaaatatgctaaaataatgtttaaatgccatgcaattgcacaagaaaacttcactgattgtcaaccataacgggtaccagagaaaagggattcttcaccatcacgccaacttctgagaaaatcctaactttaggaattagccaaattcagttagattggatttagggctcgttaatatctactgtaatgggaacggtttcccaacacaaggaggctgttggtttgttgtggaagtttcagctcagtaatggagggtgagcaggtgaagaatatttcagatggggggcaactcacagtacacacgtgcagtgttcctgagctgggtgcccaccaggaacggaacacttaactggaaatggttgtggccactggtctgtgaggaaaatactggagaatgcaggcccctaaaacactgctaccactactactaccgttattacccctactactgccactgctgctactactactactactactaccaccactcctaccacaactactaccactaccaccatctaccacagctactacaactgatgctggcccaactgtcctatagaattaatgtttatagtttcttttgaataaacatagaaattgaccctcccagtcttacaacttgacaaaattacatttgtcttatctaagtccttttcttaggaaactaaccatgagggcctcccagataacatcaaagaactgaaacttcccagatcaccacatctagacagtgaggtaccagaccctcacctatcatgattgcctaactgaccacctgcttcctattgacaaactccttttccttacccttccctaattcctgttttcccacacatggttacattgctttcatcctataaaaaccccaattttaatcaatctgagagatggatttgagactgatcttctatctccttggctgcagcaccagaatagtcttcttcactggcaataatcattgtctcagtgatatagtttgaatctgtgtccctgccaaatctcatgttgagatgtgatcccgtgttggaggtggggcctggtgggaggtgattggatcatgagggtcactccctcatgaagggcttcggccatctccttggtgacgagtgtgctcttgctctgagttcacacgagatcttgtcatttaaaagtgtgtggcaactccctctcactctctcccttgctcctgctttcaccgtgtgacatgcctgttccccctttgccttccaccatgatgagaagcttcctgaggcctcccagaagctgagcagatgcccaatgccatgcttcccgtacagcctacagaactgtgagccaattaaacctcttttctttctaaattacccagtctcaggtatttctttatagcaattcaagaacagcctaaaacactcagtgattggcattcatgtggcgagcagtaggacctagactgaacccctagtgttttggcaacactaccaatactactgttaccactgctgctaccactattactattggcggtactactactaccactattaccactactgctactatcactaatactaccaccactactatgctactactattaccaatactgctaccacccctactatcatcactactaccactaatactaccaccaccactactaccactaccagtacttctactgccactacttttactattattgctataccattattaccaccaccattactactgcaacaattaccaccaccaccactactgccactagttctaccactactctaagagcacccggagcattactccttgtcaacttacacttttgagagtaagcttgtagtttaggaggctgtgctgcacacagtacctcattaaggatgtttggattctgctggctattgctgaaaaaacttacctaaattccctggtcctgggcctgtctacaaactacggaatcttcatgctctgggcacttatacactcttaggggacatgtcactttgattcagacattttaagaagtgacccaatgttaatggttcctcagttattctgagcatcctgaagttcaaggtccccttaaacatgaccttgtcccagatcctaacctacagcccggatcccttttgcagttgactccaaatggttcccaacagaccttgcagttttctcccctgtgctcactcacaccattcatttcctcttcctaaaatgtcaaaatacccccaattccctatcccatgtttaaaataataaataacttgcttgctgtcacacagatacaaaatgattggagctggacttaaaattagcctctagggctctacagtcccaacacccttgctctgtctgctccgctaactttggaattatgcatacacactgaaatctccactgtgaaattagaagtttctttcctttcttttttctttcttttttttttttttttgagatggagtctcactctgccgccaggctggagtgcagtggcatgatctcagttcactgcaacctccacctcctgggttcaagcgattctactgcctcaacctcccaagtagctgggactacaggtgtgtgccaccacacccagctaatttttgtatttttagtagggacgggatctgcccacctctgcctcccaaaatgctgggattacaggtgtcagccaccgcacccagcctaggagtttctttctaagaagaggcaatattgttttctttgtatctcccatgtaagtacttgttgcttgaggaatgaatgattcagccaaattggggtccagaccaggtgcagtcacttacacatgtaatcccagcattttagtaggctaaggcaggcaagtagcttgagcctacaagtttgagaccagcctgagcaacatagccagaccttgactctacaaaaatagaaaacttagctgggtgtgatggcacatgcctgtggtctcagctacttgggaggctgaggcaggaagactgcttgaaactgggaggtcaaggctgcagagagctatgactgtgccactgcacttcagcctgggtgacagaggaagaccctgtctcacaaaacaaaacaaaacaaaacaaaacaaaacaaaacaaaacataggagtccaaagattccatctacaaatagctatttcacattgattttgagagtatgggtggaaaagggtttctatattggaagctgagtcacttctagttcctaaatatctttagagttctttaggaaatccacctacttaaactggagagcctggattgtcaattcctgtgtgcatgctatctgattttataaaagtctttatatttcgctgtgtttcagaaagatatttgagataatatccatcaaaattcagaattctaaacgtatcttctctgcatgtgcctagattggaccaacttcctaaatctctgaggtcaagcatcatattaatttagttactgcctagcaatgtgctcagcaaaaaatgctgccacggtttctgttagaagctgcttattcattcattcattcatttttatttaacaagaatttatataaacttagtagtgacaagtatgccttaagtgcattataaacgttgactcacataaacctcacactgcccttaagaggtacgtaaaataattatatccattcctttttgttttttgtctgatgtagcaagtaaaacaaagtaacaaagcaatgttgctgcttttttctcctgtccctggatttcccagttccagggaacatatttctaaattttacccatatgtggaatggattcttcaacaggatttttaacagaatcctagaggaaaaacagccacagggaatctgtgtttgaagcaggtgtcatggtcagcattccccagactcaacctttctccctgttccgggagcaccttcctcccgtgcagcaggtctcagggcccctttacacttttccaaattattggagaccataaagaggtttcattatgtgatttgtagctatttatatttagtgtggtagaaatcttaaaagattttaaaatatgtatttattttaaaaatgaaatagtaaccccattacattatttaaaaatattttaatgaaaacattgtattttccaaaacaaaaaaatagctagaagagtaatattgtttatattttcataaatctttttaacgtctaccctaatagaatgctcaattctcatatctgcatctgcattcaggctttacagagatatgtagatggaaaataaaggagtgttttaatagtctttgtaagtaattgtgaatattctactgaggtaagttttttttctttctttctttttagacagggtctgggtttcttgcctaggctggaaggcagtggcatgagcacccagctaatttaaaaacttttgttgtagagacaaggtcttgctatgttgcttaggctggttttgaactcctagcctcaagcaatccttctgccttggcctcccaaagctttgggattacaggcatgagccgctgtgcctggccttctggggtaatttcttaaaggttagttggaatggtattttcatactctgttatgttaaaattgattgccctatcttgagctttaaatggatctattactaatgcatgacttttgtaacatcatgcattagtcatttatagttcactgagttatgcagatctttcaaatgttgacaggtttcaatatataacactaaaaaatcatatttgttaatataatcactgatctcatcacaaaagttctttaaatattgggaggctgtcaagtacataatggtggatacagtttttccacaatttgaatttttgtttgaaaaattttaccattgaatcaaatactgttggttattttccttgaagtaacaggatcaccttggttcatactttgagaaaataactgtcatctgtagtccaaattaccatagttttctgtcccttgttccgctaagtaaaagtaacagtaacaggaaaagtaacttttttaaagttctattaagaaaaggattatttcagcttgcagctcaaccactcaaatgcttttcctcaaaataaccacactttatgggaatacatttcctgtttcctcacagaggctattaaaaagtcatatactcaagggttgagataaaataaaactaataattatatggctgcataaaggatattctcaataaaattggatttttttttctgttagtgtgtagcagtgaagaatatagtacactatttacacaaaacaagtataattggatcccgcagccttgacacctgctgagacaccagcaattttatccaccattgcagatgtcaaaacaacaaagaaagtgaatgatatctcaatattatcttgaaagtagttttgaccttgcaaatccctaaagggtcttggagaccatcaagcgtgcagggaccactccttgaggactgttgcactttggcattgtgatttaaaatgtgctgcagatgggataatcatatgttacaaaggatataaggagagtagacagggatggtattcttacagccatgttcccaccagggtcaagagaacagcacaaagcccagcccaagccagggccttccaaaggggccccatgttcccctctggaggctgctgacctggagacctgccatgggcccgtcttgccagctctccttcctctttctccagaagtcggcccagccttgctagctatattttacacccaactgagcagagcaacactggacaataatcaaatgtttcccccttttaagttccccgtgtggttgacagggaacatttatgatttctaaatggtcaagtaaaatttattcttattattcttattccttttttttttttttttttttttttttttgagacagagtctcgctctgtcgcccgggctggagtacagtggtgccacctcggctcactgcaagctccgcctcctgggttcacgtcattctcctgcctcagcctcccgagtagctgggactacagactacaggcgcccgccaccacgcccggctaatttttttttgtatttttagtagagacggggtttcactgtgttagccaggatggtctcagtctcctgacctcgtgatctgcccgtctcagcctcccaaagtggtgggattacaggctcgagccaccacgcccggctaaaatatattatttttaagacaaatggtattagattcctaagaagaagctaagctaagagtttttacctctcagatcattagaacaagtatctgcctagggaaaaagtaaagttctagagatcttaaatgtgaaattatttctaaatggagaaataatgattttttccacggggagtaaactatctatatatttccaagtgatactgcttttctttacctaaagttaggcagactgtggctccttgtagataaacaggattaaaaaaaatggcacttaactcaaaattgacattgtcttttttatttgtttttttttttttaatttattgagaggaagatttaacaacaatttcttgaaggaaaaattcaattgattctgagatacattttaattttaggtttaggaagtcaggttctcattatactaaccattttttgacctttcaaaatacaaagttttaaggcttaattttaatgacatatcaaaactcagagtaaggcaatagctatcaataaattatttctttgtattacttaagagagacaagtacaggaaaaaatgaattaacacaattgagaaaatttggaagcaagattatacccccccaccccataattcatagtaattccctattctggctcatttaactatttcccaatatccttcactagacactgaaagcaggcacttccaataacatgccaaccttgtatcatttctatcaagcaccaaagctgacatcatgtgtgcttaacacgctcaatgatgtggaatgattagaaaggacataattattaaaagcatcactatatatttccagtgatcccttgaaatattaaaaaggaaaaggtatcaatgaactagcatactttaatggagaatgtacattttaaaagaacaattttttaatgtccaggtgattagtaaatctttttttttttttttgagacaaggtctcactctgtcacccaggctggagtgcagtgatgcaatctcagctcattgcaacctctgcctcctgggctcaagtgatcctcccacctcagtatcccatgtagctgggactacagagtaaatctattttacaaagaataaattaaagacaatgcccagtggaattttctttggaaaccttaaaatcagacttgtggtttaacaaactatgccttatacagccgatttcttacatgggtggtttggcaggctaatcattgtcatcaacacacatgcttacatacatgtatgcaagcatgcatgtgcacacacacacacacacacacacacacacacacaatacacatgcccttctctctgtagagccataaatttcaccatgaggctaccaatgacaaaatcacaaaagaagatagttgagcctaaaatgtgatagaaggccctagacttgaatggctgatgaggacattatgctcattaataaagcttgagtattgaatgtgcctgtgacaagcatacagcagttaagttttaagtgttcagaacatttgatgaagaaaatatcttagaaaataatatgaaaatcaggcatgtctgtttccaaatcattcatcatcatcatgatcaccatcatggctacaacttactgaactacctgttcagcattgtgccaagaaactgacatagattatctatgttaattccctttttaacataaatgagaaagccctgagatggactgctgtgtcccttgctgactctcttatttctctcttatttcagacctatagcttacacttttcctgtcttctgtgaacacaagttcatgatactgcatttaacaattgcctcaataaaggttaacttcaaagggattcatctatggtacaaacaaaatgctgctacgaggcactttacatttgcaaaatgttctggaaatgtacataaatagcaaagtgaaacagttaagatactgtttcagattctgtgaaccaagaggcggttggagatctcttagatcaaagattttagaggaattttggacaattttgcaagtgatttcctaagatccagtctcttgactagttataaacaattgtgtgttcactgggcctcttgagggcagaagagcaaacattaagcacaaggctaaaagggtttccttggaaacctggtgtttctttaatacagcacaagtcccttaacacgtcacagattttccaggctcctcctgtgtgtctctgaaaaacctgctctttgaattgcacttaaataaacacagggaataattccacttttagatatcctctccggaaagttctatcattgccaacactccatttaacacatagggcttgtcatacaccaggctccaggccaggggttggatatagaatagtgagtggaggaaggcgtggtccctccttgactggagctcactgtgctgtcatcctctaggaaagtctcctcagtttgcactcctggcactgtttgcttcaaattcatttccattttgattcaatggatggatcatctttcctaaaatgactgatattcatgaggtcagcaggcacacccagtaacagacctaggcaatagattctaggatctcagagacatatgaaataatttagtgtggttacagcaaggcttttaatttgcttcagtacaaaatatgtattattcaagttgagctattttggtttttcaactgggcagctggctcccgtataacagaagccatgaagtatgggagatgcaaaggtgaatgggacatagcccatggcccccaggaactgagaatctagtggcgtatattgtctagtaaaaataataattttcatactgagtgatgcttatgttctgaaagcactgagcagaggtagaccctgggaaaatgtaacagggtctttcatgcattaaactgggatcagagcagccatcttaccatattatccctctgagaccttgtgtatataatatctatgcatgcacttaggagttgagcaatttatcaagacctagcattatatccactggtgcaattttgggggtaagcattagtgatatatgctaaaagtggtccccagtagaaaagccacatggcattggtctgggcaaataatttttgtgtatttgacccgaaaagcacaggcaataaagggaacatagtgaaatggatgatatcaaactaaaaagcttctgcacagcaaaggaaataaccaacagcatgaagagacaacctacaaaatgaaaggaaatatttgcaaatcatatatctgataatatccaaaatacataagagactcaatacaataacaagaaagcaaataatctaattaaaaaatggggactggacttgaatacttgttttataaaagatgatatatagccgggcacagtggctcatgcctgtaatcccagcattttgaaaggccaaggcaggtggatcacttgaggtcaggagttcaagaccagcctggctaacacagcgaaaccccgtctctactaaaaatacaaaatttagctgggtgtggtggcgtgcacctgtaatcccagttactcaagagggcaaggcatgagaatcgcttgatcctgggagggagcagttgcagcgagccgagattgcaccactgcactccagcctgtgcaacagagtgagactctgtctcaacaacaacaaagaaagatgatatataaatggccaaggggtatatgataaaatgctcaacattgctgatcatcagggaagtgcaatttaaaaccgcaataacgtatcacctcatacctgttataatgactattttcaataagatgaaagaaaacaagagttggtgagaatgtagagaaaagggaacccctatgaactgttggtggagaacataagctaggacagtcactatggaaaatggtatggaagctcctcaaaaaactaaaaatagaactaccatatgatccagcagtcccactagttggtatttatccaaaggaaatgatatcaatatttgaagagacagctacactcccatattcactgcagcattattcacaatagccaagatacagaatcaacctgtgtccaccaaagcattaatgaataaagaaaatatgtataaaccatgaaatacaactcagccttaaaaaagcaatgaaatcgtgccatttgaaacaacatggataaacctgaaggacattacgctaagtgaaacaagccaggcacggaaagacaaataccacatgatctcactcatatgtaaaacgtttttgtttgtttgtttgtttttgagacagggtctggctatgtcacccaggctggagtgcagtggcacaatctcggctcactgcaacctccacctctcaggttcaagtgattctcccacctcagcctcccaggtagatgagactataggtgtgtgccaccatacatgctaatttttgtgttttttgttcttcttcttgttgttgttaaattttagtagagacagggtttcaccgtgttggccaggctggtctggaactcctgacctcgagtgatccacctgcctcgacctcccagaattctgggattacatatgtgagccaccgcacccagcctcataggtagaatctaaaaacttgaactcataaaagcagagagtagaatggtggttacctggggctgacaggtggagggattggagagatacgagctaaagaatataaactttcagttaaacaggtggaataaattcaagaaatatattgtacaacatagcaactatagttaatagcaatgtattgtatacctgaaaatcattataagcataggttttaaatgttcacaccacaaaaaatgagtctgcagtaatatatattttaattagctttatctaatttagctcagttagaataaattgtgtacatttccacattgtatatatatttcagaacagcatgttgtgcaacataagtatatacaatttttatgtgtccactaaaactaaattttaaaaagagaaggtctccaataaatcagtcctctccatgtcaacaacccatttgtgagacaactttgccttaactcccagattcaagggtagggactcttcctgccccttaaatctgggatggctttgtgacttgctttgaccaatagaaagcaatgcaggtaatgtcctgggagattcaaggtgaccctttggaggtctttcaagcttctaattttgctcaggtggaacccagcagacataagaaggaatccaaacttcctaatataaagagggaggtcacatggaggggagaccctggaggatgagacactccatataaagacaagggtcatgtggaagagtagcgaggctccagaggtctgcaagcccactcatttgggctgtctcagctgaggttctagacaggtgggaggccacttttgattcttcagacccagtccaggtgacagcatgtgaagcagggacaagctgccctccagaaccctgctctgcttcctgtcccaaaaacttattaatataagctgtacaatgatgtttatcttgagtaataactttctgggtgatttgttatgcatctcttaataactggttataacccttctgggtgtgaaccagatccagaggaatatcttgatggttccttatctttcaaggagcccatcaaaggaacttagctctttataaggctcgctggctacctggtgggtttacacagcactacagaactgtgttcactgtgttttaacaacagaagatattacccatctttgcctgaaaataggtttgtgttgctacaaggaggcacagaattatctaagccctgggtcatctcggtgcccaacatgaaaacaaagaatatattaaataaagaatgaagtacactaagcctaaataattcagggttagcattgacaattttcattgatgacgtggatgatgagaaagaaagaatggttactaagttggaaggtctgtgatagggtggggggacaggacactgaaaagctggaatttaaggtaacttattaaaatagattatcattagaatgggaaaccatacattctggaaatgttgagctttaagggcttgaaaggctattgacaaacaatgtgaagggacatgctggttatgagacatttgctggaaattgccctacgagatcatctgggcatcacattcagtttggggaacacatttagtgaggagcattgacaacctgaaaattgaatatcttttatttctgacacagcaacagacattcatcagtcgtaagttggcattggttcttgtaggtttcttctatcctaagatttagttacatcatttatggatattcagtaggctttgtttttgtctgttgatgtgccctccattttccttccccgagcccactcattcctacaggagggatgatgcagtacccctgtctgacacacagctggagtgacgtgttcactcacatgtgcagtgcagtcactgtgtgccccatgatgccagtcataattttaaatgacataactagagttcgtaggctagtgtgattccgataaatgagacatttattctctaataggtagcaatctccaaatagtccatttttagtatgttatgaatggaactagaatattatcatctgacctatccaggtgtttaggtaatgtgtggttatctttttctctgagaaatcactaaatatttatttggataacaattatagttcaatattaatgcttacaaagaaagaaaaccattaagcctaaagaataatttaaatacctaagggtgtattttcaaaactgctcccaaatacatagtcataaaaactgtacagtaaatactggcaatacctttagcttctgagtattgagagctatggcattaaaaagttccattagaatgtaatttgtatttttaaatgttacattacactataatcacttccacattcagccttgattaagaaagtccctattttcccttttatcttatgcaacttgagtcatggtcaaaatatatgaaatagtgatttataaatttggaaaacatgcagggaagcctgaaataaggaaagcgaacaaagtgaaatctctgcttttccagagatgacccaaccagcctgatggtctcttctctgagttgagagcacagtttcaacgctgaagaggccacagagctagaatgtaggaaaaagtactagaggaatcctagtgagaggtggacagatcctgagttttacagagggcccacccctgtcttttattgagttattctgataatgcatgtgggaagattagccaaggctacggcaagaacaagaatcactggagctcatacagaggtgggaatagtttgtatccctgcaagtcagtgaaagtatgtctgaatatttgagaaatcaagtagaaaccacagaattgtattaatattaccttagtaagggagccaatcagttctagactggaaccatgcaaacaagaactgtgcaaacaaggcttaaagcaaggcttgatggaatcatattgaggccaagtaactcaactgcatcccagtaaactgtccaacaatattgaaagaaaactaaaaaatccagcacccaaaacataaaattcaaaatggctgacatccactaaacaattacaaaacatgtctaaagcagaaatatgtatatattatataaagcaaaattatatatatggagaaaaataaatccattttaacagtccaaaaaataaagaaatgaaacagatgataaaattaacaggcaaggaaattaaaacacggatcataaatatgtgccattttcaagaaggcagaaaaaggatagtataaatggaaatagaatataaaaattaaacccaagtaagactttagaagataagaaatttaatatctgaaatgaaaaattatcattggttgggattaataggaagttgggcaatgcagaagaaatcatctgtgaactcataaacaacaatagaaactacacaaaatgaaatacggatagaaaaagaaccagataaaaatgaacaaagcatcaatgacttgaagtgtaatatcaagcagtatagaatatgtgcaattagagacttaggggaggcagagttaggactcctatcagaggaaagaagagatagaacagaaaaaatatttgaagggagtattgaaataaatagttccaaagttgatgaaactataaagccacagatgcaataagtaccgttaatattaagccaaggacatatgaagaaaacaacaccgagatgcatcattatcaaactgctgaaagccagtcatgaagaaaaaaatatctaaaggggccagggttaaattacgaacaaatgaagacaagaaagacaagattttgccatgcaaaccagagacaatggggtgacacttgtaaagttttcaaagaaaaactgttgatatagaattctctatacagtacaaaaaaaaaaaattcaaaaaagtaagtaaagttgagtcttgctaaaactaaccaaagtagaaagaagtcattgcccacagacctgcactaaactgctcacaggagcctttctggcagaaagaaaagaacatcagaaaaaattcaaccgatgtaaacaagtgaggagcatgagagtcagaaaatatgtggttaaatgtaacaccttttattatcagttttaaaatatctttaaaagataattaaccatttaaaagataattaaccatattttgtgaagtttacatcatatgtagaaataaaatacacacaaaaatagtagcaagtctagcaggggagtattggaaatacactgtaataagattcaacaatatatgtgaccagactcaatattacttgaagatagacagtaattatatacacacacacacacacacacacacacacacacacacacacacacacactgaattgtaggggaaaacaaacaagcaaacaataacaacaaaagaggggcagaataagccacgaatggagacaaaataatgttttatacaattaatacaatgaaatatggacttaatccaaaagaaggcaagaaagggggaaagatagaacaaaggatagataggataagcagaaaacaaatagcaagactgaaacccaacattgtcaataatcacactgaattttgatactgcaagtatttcaactaaaaagcaaatattatcagattgtataaaatgcaagacctaatcatatgctgtgtaaaagaaacatactttaagttaagtcatagaaaggttaaagcaaaaagatataaaaaataaggcaaacaaaaaatctcacataaacactactcaacataagttataatagctaaaaccattgatgtgaaatagatatcaaagtgataaacagaaagactgaagaagtgaaaatgagagaagacacacattaccaatataagtaatgaaatacgagatgccactgaagatcttccagatattagaataataagagaataatatgggcaattctacacatacaaattaaacaccttagactagtttctcataaaaccacaaactaccaatactcactaatatggtttggctctgtgtccccacccaaatctcatcttgtagctcccataattcccatgtgttgtgggaaggacctggtgggagttgtttgggttatggagttgggtctttcgctttcctgttcttgtggtagtgaataagtctcacaagatctgatggtttgataaggggaaacccgtttcatttggcattcattctctctttgcctgctgccatccatctaagatgtgacttgctcttccttgcctctgccatgattttgaggctcccccagccatgtggaactgtaggtccagttaaacctcttgcttttgtaaattgcccagtcttgggtatgtctttatcagcggcatgaaaatggacgaataccgtaaattggtacagtccagtggggtgctgatgaaaagatacctgaaaatgtggaagtgactttgcaactgggtaacaagaagaggctgggaacagtttggagggctcagaagaagacaggaaaatatgggaaagtttggaactccctagagcctagttgaatggctttaacaaaaatgctgataattatatggacaatgaaacccaggctgaggtggtctcagatggagatgaggaacttgttgggaactggagcaaaggtgactcttgttatgttttaacaaagagactgatggcattttgcccctgccctagagatctgtggaactttgaacttgacagatatgatttagggtatctggtggaaggaatttctaagcagcaaagcattcaagatgtgactagggtgctgttaaaggcattcagttttaaaaggggaacagagcattaaggttgggaaaatttgtaacatcaccatgcgatggaaaagaaaatatattctgaggaaaaatccagtttgctgcagaaatttgaataagtaactaggagccaaatgttaatccccaagacaatggggaaaatgtctccagggcatgtcagagacctctgtagcccctcccatcacagacctgaaggaaaaagtggtttcatgggccaagcccaaggtctctgtgtgcagcctagggccttggggccctgcatctcagctgctccagctgtggctgaaagggaccaacatagagctcaggctgtggcttcagagggtacaagcctcaagtcttggcagcttccacatggtgttgaccctgcgagtgcacagaagtcaagaattgagatttgggaacctccacctagattttaaaacatgtatggaaatgcctggatgcccaggcagaagtttgctgcaggggcagggccctcatggagaacctctgctacggcagtgcagaagggaaatgtggggtcagagtccccacacagagtacctactggggcaccacctagtagagccaaaagaagggggccactgtcctccagaccccagaaaggtagatccactgacaacttgcatcatgcatctggaaaagctgcagacactcaacaccagcccatgaatggagccaggagggaggctataccctgcaaagccacagaggcagagctgcccagaccatgggaacccacctcttgcatcagcatgacccagatgcaagacatggagtcaaaggagatcattttggagctttaagatttgactgccctactggatttgggacttacatggggcctgtagcccctttgtttttgccaatttctcctatttctcttgattcaatgcaatcccaatcatcatcccagcaggatattgacaaactaattataaagtctgcaaggaaattccaaagatacaggatgactgaaacaactttgaataagaacaaagtgaaaggatttagactacttggttttaagactcattatagagttacctaatcaagacagtatattattcacacaaagataaacatagggacctaaggagctgattagattctgaaaacagacccacacagatagagttaattggttttcaacaaatgtgcacaggtaattcaatggagaaagaaaaaattcaaaaagtagtgctggaatatgtgaacatacataggggaaaaaaaactaagaaatctgtatggccaaaatggacctcaattattgcttcaaaccatatacagaacttaacttgaagtagctcatagacctaaatgtaagagctgaaactgtaatatttctggaagaaaacatttaagaaaacggaagtgaccttaggctaagcaaagatgttttatatgggacaaaaataatttgagctataaaagaaaaaatatttataaaacaagttacatcacagctgaaaaccattgctcttccaaaaatacgtttaagaaaataaaaagtccaactgcagattaagagaaaatatttacaaaacatatatatgataagggaccggtatctagcacatataagagttcttagaactcgactataagaaaacaaaagtcttctttgccatttacaatgtgcaaaatatttgaacagatacttagtgaaaggagatatatgaacagtcaattagcatattttaaatgtttaatatcattttcagggaaatgtaaagtaaaaccacaatgagataccaacgcatacctcctagaatagctaaaattaaaacgtactgtgaagaactgagacaactaaacttttcaactattacttgtgggaatgcaaaatattaatgaataatttacactttttccatgaggtacattttgatattgcttagtccctatttttctctttctttttctttaatgttggccttacaatattaaatgtatttcagatcctaacaatgagtgcaacctgcagtgtgaaatacattgatccagttagctatataggtatgtctcaaaaatcacagattattattatcaaagtgcagagaatatctcgagtgagtcattacctgccgacatgaacctgcctaaggcaacaaagtgttctgataaagcacaaggtaagtcatcaggtctaaaagctaaaaagataatttatcaagacatgggacaaaggaaggaagagctatttattcatctcagctttattcagcatatagatattcacaagtaaccaagagacaattttcttaccctcaataaaatatatccaaagttacatatagcaggatttataatatatgcctacaacattttccaggatcaaagctacagaaagaaggtgtgattccatggaaacaaaggaagaaaaagcctgagaaaaaaagacctggaatttgatttggacgtttttcacatgttaggtactcaatagaatgtatttcttgatatcaaattaaagattatcatcaaacgagcctgattttttctaacaaagctctgtatttatatttaaatgtaggatacatgattttatatagttataaaaaaagaaaagacagatggaatttaactggctcaatttctaggacaaaatagcagtgcaacatggcggaatataaaagggcactgtcatctacagtctctttaacagagcgtgccaaaagttggtggcaccactgttagactgttcaaacaacaaacagagctaatatactgagttatagatgtatttcaaagagaaatgaatatgaggtagacaaactaatgaatgacccaggtctggatggtcactgtgcaagatgctgaggagtgagaccaaatgttttcaaggagcacagttgcttaggagacattgtgataatactggaagagaaatctagaatcctgaaaggacaaaagaactggcctaggcctggacagggaagttgccctggccctggagaaatctgatctgcagaactgcacaaatgcctctatccctctaagggagatctcacaccctggcaaggtaattgctgtgaggcaccatttgcacaggctccccagggggccggtgggaccctcttcgagggtcttctcatccttatacactgcttcccctctctaaactctcccaacccctgccgcaatccctatacacaccttcccccaactctcaggacggcaccatcatgtcatgcatcgctgtcatcattatccatttttattaatgacacataggttttatagctcagattttctatttttaggcagaaaaaaaggttgggaactacaggcacacaggattacttcaaacttccaaaataggcaaaagaggttatttgcaatctagacttcatcagtttttctgtgcaaatatatttttttcaataaaatgacctgcacacttggacatgatgtgaaaagtcctgccttggctggacatgaggggatcccctttttctggattggacacatttgatttaacgctctgcttcatacctgtccttcaaggctctgctcctgcccactcctctatttctttgtggcatttttctgacagcccatcctgcattggtttctcccctttctgaactccgttacccttatttgtactgatcgcttgacccactgtgctcacacacagattatgtcttcatctgtctgcgtgttttatcaataaaggaaggaaaagcctcgtaattatttgtagaaatacccttggttgcactctgtgcctggtaagtttttggtgcttaatggatgcttgttgaagttatctaataaagaaaatggacattcctcttgccatctcttgtgtaaatgttgtcattttgccaaaataagcagacaaagagtttggagacaagaatagtcactgtatttcaagacaaagcaagagcaaaatgaaaaatgacaggtttgtagtttcagcaatttggggaaaaaagtgagctatttgcaaaaaaaaattgtagggattgatataaacttcaattgagttgatagaattattaaactaaaagaaaataaggatcctataataaaaactttaataaaatttcatgaatgatatgtctaggagaggtattatactactctctagtggttggattatagagcaagatgatttcagaattaatttaggatttttttagaaagataaaaacagaaatgtaaataaaatttaaaatctcattctttcatgaacatttcatgccccccaaaaatgctttataatttcaaaattcaagaacatctcatgtaactagctatcattacaggtgaaaatcaagggactctggaacgtgcaatgctccttcaaattttgtcatctgaaaaggtgacattggtctgatttggttgaggcatctgactatatctgtaactctgacgtccatatttgcatttccaatatgacaactcccaactgaataggaaatttcctaaaattttcctttaatagcattgtaaagttgttaaggttgcgtgaacatctatttttatctcatttattttcattttttattgccaatatataatatttcatacagatttaattttattattattatacttaaagttttagggtacatgtgcacaatgtgcaggtttgttacatatgtatacatgtgccatgttggtgtgctgcacccattaactcgtcatttacagatttaattctttttgagcagaaaccatttttcaagacaataaaggtgaagaaataaggtaatctttaaataatcattataaagatcttgcaaattgatggtaaatttctgagtacaatagaaaatacattagaatcaatttcagaaacatgaacacaagttaattgttgtgtctaatgtgtaatattgcatttgatatttgatgaagaaaaatagatatacagagccatgtatatgtccatattagacagtaaataactcatattttatcttattgctatagtatggaatttagctataataaccacccagatatttccggtctggttctagatatataaagcaatttaattcagtttaacttagcaaattataatcgttgtgcttagttaatattaatcacaagaaaaattaaaaaatccctttcacataagtacatcacttgacataatagacatgaagaaaggatcacaataacaaaatacaaaaaaaaagttgtttatacaaattatctcatttatttctaagaaaaatgcctgtccactatcatgatcctcatgtataaacggggaaggtgaggctccaaattatgaagccccttgccctcagtaactttaaggcagcctcaaacctagacctagtgcgtggatacacctgccctttcttctatgcaaaagttcctcaacaaaaggcagattggagaacttccttggaagtaaccattgaagtacgataggggattagaggggtgtaaagaaccttcatgaacatgaagccagagtatcagttgtgttcggcaggagatttcaatgccatccattgaaagcattgagattcagtgttatccattgtgtttggcaggagatttcaatgctcagattctggaaaactgtctgggtgggaagacaggaaagtaaggctggccagaggaaaggattcagtgaacgtcctctaaactttgacatggtatctgagcaaaaaatcttctaagagtttaagttttgaccaaccaataagttttaattgaaattcaagttaaagatgtggatgctgaaaaaaactatgatatctgtaaatccaattcatatagttctgcagctgggaacgggagaattttgtaatattccaaggagggtgtttaggttatgtgaggtgaagattatggccacaagaacatgggttttactggcaatcaaagcaagccttcttttgctcaggattgccggtactgaagggcaaaagtaagattgtttagcaaacagtaaaaattagtgttttagaaaacatctaattaattatcacaacataaaccaaaaaggaattttgtatgtgaaactagaacaatctgctaaaatgaggggataggctaggatgtgaataaactggatagatatgaaaaaacatgataaatgaattaaggactgaaaacagtagaataatgcataaaattgaattagtggggtaaaatacaaatacaaactataaatgtttcacaaaaatttagagaaaaaaaacccctgatagaacaatttaaaaacctatgaactggacatgaatattcaacctatttttttccaaaaattccaggaattcaggacacagaaaaggaaataattaaagaaaaaaatatatatctattttgagatggagtctcgctttgtcacccaggctggagtgcagtggtgcgatctcggcccactgcaaactctgcctcccgggttcacgccattctcctgcttcagcctccagagtagctgggactacaggtgcccgccaccatacccggctagcttttttttttttttttgtagttttagtagagatggggtttcactgtgttagccaggatggtctccatctcctgacctcataatccgcctgcctcagcctcccaaagtgctgggattacaggcgtgagccaccacacccagcccagaaaatattttttaaatgtattcaagagttcataaaatcctgtgttttcagatagaaaaattcatgaagtatccgaaatattatttaaaagagaaataattctgaaacatatatcaaagaattttgaaatataggggtaaagaaagttttctaactgtgcaggctggtaaaacaggtaatttatacatgaaaacactgggtttcatcatccaaggtcaatggaacagaatatgcacctctctgagcaaacttctatacccagccatcttatctttcatatatgagggcaaagaaagagattcacccagattcaaggtctcaccagctataccactcacatataatttctgggaaaaattactcagatacatcttctagcctatcaaaagaactcaagaatgtattgcataacttaatctcagctaaacataaattatgtcaaaagatatgatatggtcatgaaacctaaaatcaattctatcattgtcagcatcatcatcaccatgtataaagtctcacattattgttattggaacaaggaactgactagaaagaataaaaaattaaaattatataaaattacccactttatacccaagaaacccatagatacttttttattcttggcttttacacctataaaaaagtttggataagtatatataaaatttaagagtaatcattagaacaaatactgaaggaatgcttttgagtcattagagaaaaagtggttatgaaaatgacatattaagggactgataatataataaaacaaaaaaattaggcacaaagcaaaatacagtaacaggataccaattgtgatagctttgtagctcaagaaaactcatattttcaagaatattgaataatttgatgagataatcacaatgtaacactggtaaaataagcccggtgagaaattatatataaacaatgccaattttcatttttaaagtaagtctatagatatatgtgaaagactaaaaggaaacagtttgacatgaatctgcgcttgagtgtatgactcaagatctatgacttgggttctggatttcgtttatcttttctttatccgtatcaaaagcctctacatttgctaaaatcagaatgcctggtatttataattcagaaaatcagcttttgttttcaaaaggtggaagccactgaaatcctgaggaaaactgagggaatcaagtcaaactttatggagcaagcaggaaggtcaggattcaggagagttggtttgaaccaagtatctatggtgttatgggttgaattctgtttccccaaaatttgtatgttcatgtcctaccaccagtatctcagaatgtgaacttatttgagaatactgtccttgcagatgaaattagctgaatgaggtcattagagtgagcactaatccaatatgcctggtatctttatacaaagggggaatttggacacaaacggacatacaagaatgccatgtgaccctgaaggcagatatcagatgatgtttctacaagccaacaaaatgccaaagattaccagcaaacgaccagaagctacgatcaaggaatggaacagattctctctcagagtcctcagaaggaagaaccctgctgataccttgatctcagacttccagcctccaaaactgggagatgatgcatttctttcgctgtaagccactcactgtgtgtgctttgtgatggcagacccagcatactaaactaatattaaactaatatagaagcttaataaggagagtgcctgggagcaacagcctcaggcatagtcttaaaagtgtcaccttctcacctatatttaccataatatgttaacctgacaattgtttcagccatgaagaaagacagaggaattgatgtgtgttcaagacttgagagccatggagaggagctggtatcaccactgcctgcagctcaggcccatcactgcatccttcactccaccattcctcacctggattcacctcacccctgacgttagaacctgaacacgcctccgaaactggtgagacagaggagagaaactaagcatacagtacctgtcctgtcttgtcaaagggaagcctgaccttcggtaagcatagtcataggcaaggggaacccagcctgctcagaaagtgctgcatgagttcattctgcaaacttcagggcacttcttagcatgctcctttttgaagaattacatttgtgcttgtgggattggtgtgggacactaggctagaaaaatttggatatcaaatacatgtgctctcataggagctgccagcgctgtgtgttttgaggtgtatgttgaaaaataaccctgtcccagagcctttcttttactgcctctcacagtctttgaatttccgccatcaaggggcatatctttggctctcaggagagataaacaacagtattatcaatcaccattttagcagaattaacacctgagaggcggaaaccaaaatggacaaaggaaacaaaaagtacttggattttaagacaaatatctccatgactttctctctgacagtgttgaaacaaatagctccttgggagaggacatttcttttcccaggtgccctgcaggggagggtgcttagaagaggtctacagagccaaccttgagaaatgtcctatagggctgtggtttccctgcctaagacaaactgagaatgaggaggctctgagcatgtaatgcatatggaggagacagaaaaggctcttttaaactgaatgcctcattgacacaactgctatctttctataaacttagacaagggatggcaattatgagcatatccactgatgcatgtcctgctcatgcccatggcagacattgctaatcaattactacactcttttctagtgagcacagataagacttcagaatccttctcagttctgcattccaggcagtcactaccagtcagatggaactgacattcaaaatgtaatttatttccagtcttggccttcgagggcatataccctaaaagtctaaaaggttcgttgacatatttggatattttaattttatgtgcctggatagaaagctttgttttaaaagttggtggccgagcacagtggctcactcctataaccccagcactgtgggaggcggaggtgagcagatcacttgaggtcaggagtttgagaccaaattggccaacatagtgaaactccatctctactaaaaaaaaatatatatatacaaaaattagccggtcatggtggtgcatgcctataattccagctactcaggaggctgaggcaggagaattgcttgaattcaggaggcggaggttgcagtgagccaagatcgcgccactgccctccagcctgggtgatagagtgagactccgtctcaataacaacaacaaaaaagttgacatgtaaagtctattttttaaaaaatgtatatgttgtttttctggattttcaataacaacttgcaaaaaccacatttttaaacttcctccatatgaggcagccacaaaaccaaaatctctttgctgcaggtttttccaagaagtaaaggtcttgcagaaaatcatacattcaaatattccatcaatgtaataggtaatcaacctcaataaaatgttcgtctatccacatagaatactattgcctaataaggtcttttactaagtaattataacgacacaattttatcagtaaaggttaagtatctttatctgagcagaatccaatgaaattagtcctgatgtaataagtaccatttgtcactattagagctagaggggttgacaggcttggatgtctccctggcaacccgagtgttccatttcttttttctgtaaccttagacactaacaaggcataaaagtccagagggcatagaaggtatcgcctgggtaatttatgtaccctcttctgactttgccaggcagtggcatatgcgagcatctagaagcattttaacagcaaatatattcattcccaaaattttgagtcacgatgaatattttgaacagaagtattgtattaatgtaggtaggttttcattaacaaggacagttactaatttttaactgactcattatccacaacgagagagagagagattgagaacatgtatgtaaacggtgttacaacttcctaaacacactgcgcatgctcacctcccaaggggaaggagggcactgcgcatgcgggaagctcgtcctaagcgaagagtcatgggaaaggggtgcaagacacctgaagtgggccagcctacaaagtcctaggatcaaggttaaagattgcacttgtccttcaagttgcctgcttcagtctcttccaagtgtacttccctttctttcctgttctaaagctgtctaaaataaacttccactcctgctctgaaacttgcctcagtctctttttgtgccttataccccttggtcgaattctttcctctgaggaggcaagaattggtgttgctatagagccatatggattcgctgccggtaactcagataccatccaccagtaacacatgtgggccatgatcagtgatgtaacaaaattaattatgaatggcatttcatagatgttcctgctatcagtcttaatgggcagaaatccaagagcggaggctgtgaggggtgtggggaagagggagatgctggataaacatttagagaaatattacaaacaaaattttatatttcctcactttcctattatcctttctctttttatatatagctaatatcggttttccactttaataaataagctaatataaaaatatgatttctaaaaacaggaaggtaaaatttgaattgtcctatttttaaattttgcaaacatcaataccaagatttggaacactgttaatttgcagatagcctagcagcatgacgtaccttttaaaacagatttcttttattttctaatttagaagtcatgggataaattgcgtccccccaaaattcatggcagacccctaacctgcagtatctcaaaacatggctttacttggaaataaggtctttatagtgataatcaaatttaaatgaggccattaggatgggtgccagttcaatataagtggtgtccttatagaatggagaaatatggagacagacactgacacccatagagggaacatgaggtaaaaacactggaagaagccagccgtgtgactggcgtgatgtctataatacaaaccaacaagagcaaggcttgccagccagcgccaggtgccgcaggaggtgagcaaggacctctccagaactgtcagggagaacatggccctgcagacacctgaattttggaggtgtaagctccagaactgtgagagaatcagcttctattgtggtcatatgttatggaatccccaggaagctcacacaatttacttcagattaaagataaaaaatctatttccagaatataatcaaaggttcaacaacgatatgcctgaggacatgacattctgggaatagattatattctggaaatagctttcttatctttaatctaaataagctgtgtgagtttcctgggggtttccacaaaaaattatcacaacaggccagtcgcacatgtaatcccagcactttgggaggacaaggtgggcagatcacttaagttcaggagtttgagaccagcttggccaacatggtgaatctcctcatctctattaaaaatacaaaaaaattagctgggcatggggatgggtgcctgtaatcccagctattctggaggctgaggcacaaggattgcttgaacctggggggtggaggttgcagagagccaagattgcaccactgcactctctgtgacaagagtgaaactccatctcaaaaaacaaacaaaaattatcacaacagaagtttaatctcttacagttattgaggctacaactccaaaacagaaccaaggtttgggttacataaaggaatgctgggatcaaaaaagataatgatgtagctgagattaaaattctcttcccggccaggcatggtggctcatgcctgtaatcccagcactttgggatgccaaggtgggtggatcacctgaggtcaggagttcaagaccagcctggccaacatggtgaaaccccgtctctactaaaaataacaaaaattatgagtgagaacatgcggtgtttggttgacgagttaacgggtgcagcacaccaacctggcgcatgtatacatatgtaacaaacctgcacgttgtgtacatgtaccttagaacttaaagtataataataaatagataaataagaatttttttacccccccctaaaaaaaaaaacatacaaaaattagctgggcgtggtggcgggtgcctgtaatcccagttgttcaggaggctgatacaggagaatcgcttgaactccagcctgagcaacaaagagcgaaactcggtgtccaaaaaaaaaaaaaaaaaaaaactcttccttgttcatttcataaacttaaaaacaaaaatacagctttttttctgttttagtataattctaaagaatatatttacttccaatcttatagtttctaatccaccttcagcatgtatatacacacacacatgcatgtgtatccataaacatatataaacatacacatgttaactatatatgttatatatgtgaacatgaataaactatgtatatatggatatctatctatatataatatccttttgtagggggcagaataaaggacaatgaagctaaacttttcagtaaatttcactttgcttgctggtcaatcaagagcttctccaaatctcatgtttgattgttaaatttgcacctgtgaacacacatggattggggtcagagggtgtggctggccccatactactccattggtagcactggaagaaaagaccgactctggactgtatccagcaaagccaggcacaattgtcaggggcttgtgccctggggctagctaagcaggaggcagacttcctaaactagcctgactgctgtcacagttaacagaagctgcatagatgggtctgcctacaatggtcacaaatgttgtcactttacaagatccatggacagtttgttggaaaacctgtgctgcttccttttctctccatttgtcctttcattggccattcagtaatttggcgaggtggtctatgggcattttcacgagtggacgttgcctgctgtgggaacagttcacggcatctatgtgtctatactactatgcatctgtgactactttcagaaataggaaatttgtcatctcgttatacattctaaattgttaaaggttcataatgtaaatggcaatattaaagttgtcaaaggccacatttcactatttattttgtttttagatgtcaatgtcataaaagataagtgttctagagagtactatgacatgagagatgaagaaaagtacaagatactttcccagaggcataactcaaagggctggagcctaggaaagaggcccagcaagctttgttgtgtgcttcctaggagcaccagctagtgaccacagcaaacatgacaatgggaatggtgtcatttgggctggggggttggagcagcacacacaggacaatgtccacagtcattctcctcagtcaagcccaaaccgtcatcttggctcacatttgctctttcttcattggtacttggctaacactttgaaaaaaaaatctagtgtgcaagggtactatccctatttgtgggaatacttattacagggggtataataagcagctccctaggtgtcagccccgggacctgatgctgtcagccgtctgagataccagaagcttgagtgttctgattccaggctcaccaagcaaccttctggccacagcactctctgcaatgagccttgaagacagcgagcagggcatacaggagaggggcctaggtggcccagctgactgctgctctggtcatggacctgtctgtcccagctgaccagaccactgtcattggaatggggctgtctgtcctagctgatcactgtcctgggcatgaacccgtgtgtcccagctgatcactgtcctgggcatgaacccgtgtatcccagctgaccatggccctcggcatgaacccatgtgtcccagctgaccatggccctgggcatgggccattcatatactgacaaactcaattgttcaataggttaatgggagctttgttaccatgaaccagaattaccaaaccccctccaatctgggtcagtatcaggatcgtttttcagagtctagaaggctaaggtcagacctcaagtagaagagatttgccaaacacaatgcccacctgcagtcaacattcagaatccctggccttccctctgtgaatgaaacctcagctcccttattgctacccactttgcagcactttatgcaaaatctctacagcacagtaaacacagggaaagagttagggagaggataagctgccccattggctttgtcattggaagaatgctgcagattctcatcctgatgcatcaaaccaaaccagacacaagctagggaggctatgctcacggctgcctgccgcatgtggcctggtgctgctatgtcttcctgtgagctttgattgaagatgtcatccagttgaggtcagttaagtattgtgttctggatgaatatcagcactgaggcagaaagccccatttttttaaagggaatttcccaaatgatactgattaatcagctgaattttgatcctaaattcttccagaccttgacccattatactttgtgctacactgtatcatcttcgctctgggagagctccatctttcttgtctgtcctcacagtccaggtccagtctgatctactatgaaggggaatctgcctttaagtttctgaaatttaggcttggcatgttcaacaccaaagctcatctgtcttaaccctaatattttacctgagatttacttactcttcattctcccaacaaaggcgctggcctcaactgtgtgaccatgagggcaaatactttgtgtgtgtgtgtgtgtgtgtgtgtgtgtgtgtgtgtgtgtgtgtgtgtgtgtgtgatggagttttgctcttggtgtccaggctggagggcaatggtgcaatctcgtctcactgcaacctctgcctcccgggtccaagcaattctcctgcctcagcctccagagtaactgggattacaggcatgcaccaccatgcccagctaatgttgtgttttcagtagagatggggtttctccatgttggtcaggctggtctcgaactcccaacctcaggtaatccacccgcctcagcctccaaaagtgctgggattacaggtgtgagccaccacacactgctgcaaatactattttattatcaattgttgaactgcagttatgagtcttttatagagtctaagacaagcaaaaactaaacgagaaggcagaactatctccaaacaggatatgcaaatttactaattccctctagagcaaatatccatatttagtgtcgtggggctgtgtgtttcagctggccgctgccctgggcataggcatgttgtgtcccagctgaccactgacatgatatcgttctacttcctttatcatacagcgacctaatacacacacacacacacacacacaccatttcatgtgactcctttcatttaggaatataaaatataatgaaagttgcattagtgtatgaaaactttgcattttaggtactttttcaagcatcactgtaaccccttgcagcatggcacttttgacagcccccacatggctactgagtacatactgtataggaggctctgagcttgctaggcaagggagatgaactggcaacaagacataatctttgctctcccatggtgcttaaagttgtatccaaattttcaatgttattatatggcaccaacaaaatataataatgtttttcattgcaaacacaactgcagatttccaattttttgcaaaatgtcttttgcaaaatataattttaaatgttacatttatggactttagagaggcagtattgtatcaagttttttgtgcttttttttttttggagacagagtttcactcttgttgcccaggctggagtacagtggcgtgatctcggctcactgcaacctctgtctcccgagttcaagcaattctcctgcctcagcctcccgagtagctggggttataggcatgcaccaccacgcctggctaattttttgtatttttagtagagatggagtttctccatgttggtcaggctggtctcaaactcctgacctcaggtgatccacctgcctcagcctcccaacgtgctgggattacaggcatgagccaccaagcccagcctgcatcaagttttaaagtgtgaactgtggacccagatagcctgggctcccagctcagggctgccacttgtagtttggaaagttgttaaacgcccttgtacttcaggtccttataatgtcagtagagaattaaatgagttaatacaaacaaacagcacctggcttactgcctggcacacagtaagtactcattaagtgctggctattattaagtactccagaatatgttacttattttacttatttgataaacactttctggattttttctatgctgggcgctattccagatggtgagatgcaaaatataataagacatgacctctttccttaatgcaattttgggtcataggaattaaagttactaatatctccttaaaaatgaccaagaaaagagccttcagagcaactctattaaaagtcattaagaccttgtgtaaaatacaaatgaacaaaaaataatttttcctaatatccagtaatctgaagagtaccctcacacacatagagggggctggtcgctgcttgtcacctcttgctaaaatccagcactctgcacattgcatttgatggagaattaatcttcataccttcactcacagcctagctcagtgctattttaggtacagttttagcaacacaatgttttctacaagttgatgtagagacagctgtgatggttaatactgagtgtcaacttgattggattgaaggatacaaagtattgatcctgggtgtgtctgtgagggtgttgacaaaggagattaacatttgaggcagtgggctgcggaaggcagacccacccttaatttgttgggcacaatctaatcagctgccagcaaatattaagcaggcagaaaaacatgaaaacaaggactggcctagcctctcagcttacatctttctccctggctggatgcttcctgctctcgaacattagactccaagctcttcagttttgggactcgaactggctctccttgctcctcagcttgcagacagcctcttgtgagatcctatgattgtgtaagttaatacgtaataaactcccctatatatatacacacatatctatcctattagttctgtcctctagagaaccccaattaatacaacagtgaagagtggttttcagggccctggctctaccgctggactcctgtctatcttcctcctgtgtagctttactgccggcttcgcctctttgggcctcattgtcacaatctgtaaacagaggttttgggaaagtcaaatgagataccgtgtgcgacgcacttgaggcagaacacacagcacgtgcttcacacatctttaccggcattcttcttctctagctgtacaactagaaggtggtaagggtggaggcagcagtgagagagaagccgctactgagacagctggagagggagaaaaacaactgcaaaatcttacaaatgaaaaccagcaattcgaaaagcaaagcagtctgagaatatggagcatctctatgttatacagaatctctgcgaagataaatagaacaaaaatagttatcctgccacatcttcattatctctcatttaaaagggctgatgttatgcaaagattttcagaaaaacttccatctaaactaattgaaatctcatgtaatggggtgtacaactggcccctgaacaacccaagtttctgcagtttcactgatacacaaattttcttctgcctctgcccctcctgagatgaatccttctcccccttcctcctcctcagcctattcaatatgaagacaatgaggacaaagacctttatgacacctcagcctactcaatgtgaaaacaaggacaaagacctttatgatgatccacttccacctaatgaactactcaatgtgaagacgatgaggacaaagacctttatgactcctcagcctactcaatgtgaagacgatgaagacggagacctttatgactcctcagcctactcaatgtgaagatgatgaagacgaagacctttatgatgatccacttccacctaatgaatagtaagcatatttttttattccttatgattttctgaataatgtgttcatttctcaagattattgtaagaggacagtatctaaaatatataatgcaaaaaatatgtcaatcaactgtttatcagtaaggcttccagtcagcagtaggctactatattgaagttttggggagtaaaatgttatatgcagatttctggctgcctgagcagtcagtaccccaactgctgcatttttctagagtcaaccgtactagtttcttgtggctattgtaatggattgccaccaacttagtggcttaaagcaatagaaactgattctcttataaatgtattcttctggccaggtgtggtggcttatgcctgtagtcccagcactttgggaggccaaggcgggcaggtcacctgaggtcaggagtttgagactagcctggccaacatagtgaaaccccggctctattaaaaaatacaaaaaaattcgctaggcatggtggtgggtgcctgtaatttcagctacttgggaggctgaggcaggagaattgcttgaacccaggaggttgcagtgagccgagatcgtgccattgcacttcagtccgggcaacagcatgagactctgcctcaaaaataataataaaaaataaatatataaataaataaataaatatcttcttcttctgatagtcaaaaggctaaaatcaaggtgttggcaaggctgttttttccagaggcttcagtggagaatctgttccttgcctcttccaccttccagaggctgcggtgtttctcagctcctggccatcactcagatctccacttccttcctcacaccaccacctcccacttcggccctccagcctctgtcttatgaggacccttggggttacctttagatgccactcaaacactctaggatatcctccccacttccaaagatcctcaatttaatcacatctataaagtcctttttcccacgtaaagtaacattcacaggttcctagtgcttcggattcaacatctttggtgaatggggcattattcagcctatcatataggacacagctaattatcttgccctaaaatagatgccccttttcatcaacgaagccagaagatgagctatgaatagatatagtaaaggaaaaaagtagtcagtgcccttcattttgacatgcatcaacttactaaatctcaaagcaattatatggcttaggtgagataatctctgtcatacaggtgaggaaactgaggcccagagggtgaagtcatgtgcccaggttccacggtagctgagctgggtttgcacctggggaagtctgagcctgaaacctactctcttaaccaggttgacccatcgcttctcgtttgttcttctttcccagctgtgaaagccaacatttctgttgtaaccattttctatctgtttcaaattataagcaatttacagatacaaaaaaaatcagtcacatttcttcttcattcattaatatacctgtcaaaatgagccgggcatggtagctcacgcctgtaatcccagcactttgagaggctgaggtgggtgaatcacgaggtcagaagatagagaccatcctggccaacacggtgaaaccctgtctctactaaaaatacaaaaaattagccgggcatggtaggtagtcccagctacgcgggaggctgaggcagaagaattgcttgaactcgggaggtggagactgcagtgagctgagatcatgccactgcactcagcttgggtgacagagtaagactccgtctaaaaaaaaaaaaaaaaaaaaagagcacctgcagcaggcaggcaccagctgcacgggaccaacacagaaagcataacatctgcctgttcatatgggctccttctgctttgactggccccatctccaacccctgcacgggactgcatttttctttgaagatgattttcctataattcaattattaaggaatgaaaacaaaagcttggagagagttggatttgttcacactgttggcggatggcagaggtaggatttatttttttctatctctcttccagtttagggaaatggctagcaagagactgcacaatgtcacctgaagtggatgacatcacttgaaataggtgacatcatctgaggtggatgtcacctgaggtagatgatatcacctgaagtggatgatgtcacctgaggtagatgatgtcacctgagttggatgaggtcacctgagttggatgaggtcacctgaggtgatgacatcatctgaggtagaagatatcacctgagctggttaatgtcacctgaggtagatgatgttacatgaggtaggtgatttcacctgaagtggacgatgtcatctgaagtggataatatcacctgcgttgggcgatgtcacctgaggcagctggagtccacaccacatggtttcacctgggaagggccagtgacttccaaggggcatctagaccgcctttcttcttccaaactgggtatttcattctggccctcgcatggctgcctgtcctaatgcagttccacaactttccttaccagccttgtcatcaccattttccttttaatcatgtttacacacacatgatcacgtggtggcagagcacacttattctcaaacattaatgccacacaaagtccaccaggacaggatacgtttaaccctttcagcttgtacagccagagcaggtgtgaacacacaacatggaggcagagagcagtgtgctcatgccaacacggagacgccaacaacggcgtcaaacatcagcaaatgagaaatcacacatcacctttccagtgtcttagagttaaacaaaaccctttcttgaaaaacagattatttgaatttaggcttagaatcaaatggctgaactcaaactctatctggacgctggcaagaccatgcacactacaggatggtagccactgtaggatggtagctcagcctgggggctggggacacaggctgcagtaattgcttctcataatggtgcattatgctaggaaaacaaggtgagcaattttcctaatcaggccatcaggtggaaataattaaacaaaataatgcagcagcacctcaattataattgcaaaaagcagtcctgatatgccctgtgtataatgaaggaaaataatttttgaatttgtgtaattatttgttattctcaataaacctatattgatcattatcaatacaacatgtgtcacaaaaaaacacccgattagacactaaatccagatattggggagaatgtacaatcactgatatctacaagacccatttcagctatgaatgattatttcctcacagccttgagaggtagccacaattagccttgtttgttgagtgggacaagtaggaaacgaagaaagaacatggccctaggatgaccttttgagacaggccatcctatcctgaaagacctacattgtccccaacaagtgctctagaaagttttccaataatggaatcgatcagtgatagacaaatggtagggagcggacaagatctctccttaggcaggaggtggcagagattaccccggaatcacccttttccagttctgaagtctggtggctgcggtgtgaggtggcgtggcacaccagtggccttgccccgcagctgccaagcggaatcctcttggcttaaaggaaaatcctgtgagcccgcagctgctcaaagtgcagccttgttgctagatgatttattaaatccttgcattctttcaacttctctaatgtttgtttaatttagttggtattatgcagcaaacaaaacaacaaattttatagttttacatttcagatttaagcctgggatccattctgagtgaatttttgtataatctttatgtcaaaccctggtgacacaagtttacctttataacaaacctgaacatgtacccctgaacctaaaaatgaaagtttaaaaattaataaataatacaaatttaaaaactgtatctaccaaaaaaaaaaaaaagctatgagatttaggtgaaggttcatttctttgcctatgcatatccaattgctcttgtactgttttatggaaacaagactatcatccctcctttgaattgcttttgtacctttgtcaaaaatcagctgagcatatttgtgtgggtctatttctgggttctctattcagtttcactgatctctatgcctatccctttacctatacagacagttcctgtccgatggtttgacttaggatttttgcactttacactggtgcaaaagtgatacccattcaatagaaaccatactttgaattttgatcttttcccaggctagcgatatgtgatatgataccctctcatgatgctgagcagcagcagggtgccacagctcccagtcagccatggaatcaagaaaaacaaccatgagacattcaacacattttacaagacggacttgttagatgattttgcccaactgtaggctaatgtgggcattctgagtgtttgaggtaggctaagtatgatgttcaatatgttaggcatattaaatgcattttcagcttaagatattttcaatttaggatgagtttatcaggacataaccccatcataagtcagggagcatctgtactgtggaatatttttaacatacttttgtgccaattaaattaaagtgtctctgtatcaattgtagtgatgtatttcttcatctaaaaatagttttataattcagaaattacacaaagattaatatggaaaaatttccccctgagatggttagtttacacaaattacacttgaacagtattttcgggtttaagttgccccatcatagtcctctgggggaagaacctagaacttctcaaaacaaggctgagctgaattctctctgaacaggaattcagcagctctggttcatgctggcatctagtggtgtgtgcacatacatttagattaggaaatctggtgcatatttttaacaattaagatagattcttaactctccactgagtttgtctcttattgacccagatgacagaaaacagacaacaggggtctcacctgagacttgtttggcagaacaccagttctgtgggatatgatgaggggtgtcaggaacagctacaaagcttgaaggactcgccaagtgaaactaggccgccctcgttaaaaaatggttaagaatttcaagacgaaaacagcagcgcattaagtcaagcactgggtccttctaagagcacagtcttttgggatgatagagttcctgcatgcatgaagccagcttggaagcctgtttcttgctgaaacaatcaatttatagaatttagattttattacctcagtaccctccagggtgtttaataagttattgtaaattttgggtttctgggaagggcatatactgttttccaaaaggatttggttctgcatgtgagttatggcctctttttgggaaatagtgtgttacacttactgcagatatgccacatacctataatcagatgtggtggctgaaaacacaggaagtagattacatttggctgaaaaggtaggaattcactttcaggattcctgaaaaggatcaaaatcaggaatgtgaaattaaatgattattttgatggatgacctacaggcggctttcttcagaaggggtgtagacaggctctgtgacatgttcactgtttgggtcacattcaggaccattttcaagcaaggggagacttgctgtgggaattgccactctaagaatcacaagggggattcaagaaactaagctcggggctccaccaaggtgtccacagagtcacagaggcaatactactactaataatagtaataacaatagccaagcttcaccaagcaccaaccatgggagaagtatgaagattcccatgagcaattacataatcttagtgaaaaccctgtgagaccagctttatgattatctctattttgcaagggaggcattgaggaacagagaggttaaataacttactcaagttcacagaccttaaaagaagagccagccaggggtggtggctcacacctgtaatccctgcactttgggaggccaagacaggcagatcactcgaggttgggagttcgagaccagcctggcccacatggtgagaccccgtcactactaaaaatacaaaaattagccaggcgtggtggtgggcacctgtaatcccagctactcgggaggctgaggcagagaattactggaacctgggaggcagaggttgcagtgagccgagatcctgccactgcactccaacctgggcaaaaagagtgaaacttagtctcaaaaaaacaaaagaaaaaaagaagaagagccagaactggggcactggcagtcaggcccttgaggccaagctctcagatttggcttgcagcaatgttcatctcatagcctcacaggtctcagtctgaccctatgtcctaccctgtattgaccttgaagctgccttcttgctcgccaccaggtgtatgctgacaccaacacctgattaaaatgaagtttctggcagtagcagcagacccaggaccaggagtctggggacacagcatcgagtctgtattctgccatagactgtgtgaccttgaggatgccacttgtcattgagcttaaaatgaaggagatgagataatttttgagacccttttcaaccctaagatctggtatcctaatttaatgatcacactcaataaaatagagcttgtgatattgtccaaagtaaaacaattctagaatataaactccatagatgcaacgatcatgtgttatgttaatcttggtatcttggaggtctagaacagttcctgatatacagtaggctttcaaacaatgattgggttgatgaatgaatgaatgagtggtaagtgaaggagttaaataaatgagaaagtgcaataatccgacataaagcaaatgaacattatacacttttgtaagcctcacaaaccatggcaccaaattgaatcttgcaatcatagcacggccttggccaacctcaaggtccaaggtctcatcaacatttagttgttggacctatcattgctggtaataggcacacagtgtctctgagtaaaagctaccatgttggcccgagaaaaagctttcttttgatgctaacaacataaggaatgaggactgattgagataatttatttttgctctccaaaatgagggtgtcttctggcaccttttgaaaaacagcagacctttcatctctcacgaggcactgtaacatacatgctgagagcttggttcctggagttggattcacagatttcacccctacacactctaggggatgccaagcacactgccaatatcgacatcttagatttataaattttacaattttttttttctggaaggtagccatagagtggcatgttcttaaaaaaccagtatatttcaataatttttcagcagatgaaagtgaggtatcataaagtagaagtacccttttctattgcaccattgtcataggtgcaagcaacatccctgtttaccacccattagctgtgcatatttaggcaaattgctgaacctctctgggtcctagcttactcatttccaaaatgggaatattaatattacctcctgtatcatggagctgttgtgaggattaagggagaaactagacacaaaacagctatgataggtcttgcaaatagtactcaataaattagttaatattagttccacaacatatacacaggcaaaacagaatcagaacttaaatcacttttaaaagatccctgtgcaaaaatgttattccagtgcagatcaggcctggatcccactgttcagttattaatacagtggaactggagtgaagtcagaaagtcaagttaaaggtagaacagatttaagtgaaacatagttctataaaggtaggactagcaacacttcagatgtttgaacagaaagaattcagcactgagtacttaggaagcatgtattcggaacctcagacagaagtggctgagatctgagtcccatgcacacattggagctgcctagccatgctaaagcccaatgcttccttctgtattagtctgcttttacaatgctgataaagacatactcaagactgggaagaaaaagagatttaatttactcacagttccacgtggctggggagccctcacagttatgatggcaggcaaggaggagcaagtcatgtcttacatggatggcagcaggcaaagagagcttgtgcagggaaacacccccttacaaaaccatcagatctcatgagacttattcactatcacaagatcacgagaacagcatggaaaagacctgcccccataattaaattacctcccaccaggtccctcccacaacacatgggaattcaagatgaaatttgggtgtgaatatagccaaaccatatcaccttctggaccccttcccaatgctctgtgcctcagtccaaatcagggaggatcaatgtcctcaacaatttacagtatttacaaaaaagtattttgtgactgtaaagcaacctgggtcttctgaatgagttgtaggaacatgtatctgcacattaatgatgtcagtggccatggtgagatagcatttgggtgatcagcatccatgatgctagccctttgaacatctgactcattgttcaacctagtggcagttctccagagagacacatggaaggagacagtatagaagaagggtaatcacaaatgttaaaggctccaaagtccaaaggctcaggcctgagtcttggctgtgtgtgacactgagcaacacagcctcagggctaccccatatggcaggacctataccacatgaggttgctgagtggatggaatgagttgacatgtggaaactgaacagcacttacagacacggaaagagacagtatagaagaagggtaatcacaaatgttaaagactccgaagtccaaaggcccaggtctgagtcttggctgtgtgtgacatgagtcttggctgtgtgtgacactgagcaacgtagcctcagggctaccccatatgacaggacctataccacatgaggttgctgagtggatggaatgagttgacatgtggaaactgaacagcacttacagacacggaaagagacagtatagaagaagggtaatcacaaatgttaaagactccgaagtccaaaggcccaggtctgagtcttggctgtgtgtgacatgagtcttggctgtgtgtgacactgagcaacgtagcctcagggctaccccatatgacaggacctataccacatgaggttgctgagtggatggaatgagttgacatatgtaaattgaacagcacttacagtgtgtattagctagtcctattattaatacagttatcatcaatgttattagaatggaccacctggagctttgaggacactctcttaatggacttcaggcaagtttggggtctgcactggatgcaggctatgggacctattcagcccttctttcccccaaccccaagcttactcagttggatcttcagtttctactagtctgtggacaagaaatggtaaaccctgaggcaaacacatagaatatgaaggaaaagggagtgtctgtctctgagtgccaagtagaccagatctagaccctagagcccaggttccaagaaggaggaagtgccaggatcatctttcttgagagccgaccaaggaagacatgacccaagaagacagagccttgttgtttatttagccccctgaaattcacccctcaaccccatcctgtagtcttcttgtaagtctttcccttggtctagctccctggaggccgaataagcatagagcgttgaccatgtgtgagttgtcatgtgcctctaacaagcaggattattcattgtgacttagttatccaagatatagatatttaccatcattctcttcagttttgttttggtaccaaagacaatagatgctaaatattccacaatatgagaaggattaacaaggcagatccctcaccataaatttatgaaaccattcacccttcaaattggctacctctctcctacttcttctaagcatccttttgccaaaatcatcaatgaacttctggttccaaacatagatcatttccttctcttgtctaaaagatactcaaactttaggataaaatttaaacccttgacctgccctaccaagccctggatgaaccccagacttatttctctggttccttcttagctcactgggcttctgtgcatgcatcttttcccatctactcgctgaccaatgccctctgctcaggatccttgtgccatgggaccccatgatggaatcatttctgagtttgttggcaactcatctccatttcctcctcatgcttctattcttccactgctctttttcattgcacactgtttattttgctttcagaatatttcttactatttgtaagaaatccacttgtttgtttacttaactaatgtttatcttctcttctagattatagatccagagggtagaggttatgaagacaaccaaacaattacaacttcatccaagggggtatattgaaagaaaccgagcatatttgctgaaagaatgagtttccctaaaaatgtttcttagtacagaaagtaattcatcatatattgttgaatcaaagagtacattataaaatgttaggcactgcacaatcctgtttaagtttatatatgtaaaatatctgtgtatataacttatatatacatttacatgcatatgtgtagagagaagtctggatgttgaggtcaaaatggtcacagtatccatcttagcatggtgacatcagagtgattttattttttaaaatttactagttttttaaatttaaatatttttaaatttaatttttttatatttaaaaggtatctgctaccttttaataataaacatgtactaccaatgtattcaataatttataaaaagaatatgatacaaattaagacccctaattttttttttgtttttttttttttttttggtgagattgggtctcgctctgtcacccaggccggagtgcagtggcacgatctcggctcactgcaacctctgcctcccaggttcaagaagttcttctgcctcagcctcctgaatagctgggagcacaccatcacgctcggcaaatttttgtattttcagtaaagacggggtttcaccatattggccgggctggtcccgaactcctgacctcatgatctgcccgcctcggcctcccaaagtgctgggattacagacgtgagccaccatgcctggccgagttaattttttattaatgtttagactctccaactggaacatgcccccttaatgaaggaaataatacaggatacatctgtgaaccttgtctctcttccccggtacatgtgttcatgtgtatgcatgtgtggatggacatgaaacaaaagcatacaaaatagcagaggagagagtataactgttcttgttataaagtattagatgataagttcccgagatgcagaaatcaccactacagatttcttagttatttcctttgttatgtttgctctcacacctgtggatcatatcgtgttgataaaaatctatattagtgacaggaaggctatgtggatcttctgagtattggctaatttatgtaattcgcttaatcaatttcttttaccagcatgaaatgctaactcattccaaaatagaaatcttaaacaaggttttaattaacatttgtattgctatgggcatgtatctgcataatgtaccctacttggtagatccatttatgctgcagtagagtgtcaataaagacgttgaaatccttctttatttcggtagtattttgtatctcacaaaactgtaacatctcttaattaaagagaatgttcatatggcttcattgtgagttaaagagttgaagctgcagatggattacaggattccattcatggtggtctgtgttcccgtctgtgttcctgctggggaagccaggtttccacagtcctactcctcatgactaggttatttcatgatcaaaataaaatctaggtttatatcatcacttgttatgtccaatatgagttcaacattatttttaaatagtaaattcacattagtaatctatgagttttcatttggtcaatataatttcactggtgaaatttttaaaaaagtaaaggaaaggtaatgtcctcataacaaacactagcagatgtaagatgggtcctattttctctgctttacatcattcctacagttgtagtgattacaagtgacatgaaatgaaatattttaaagttttaattattctaccagatttacagcagctctacatcatatttgtattcctatccactttacaaagttgacaaacaggcatttatgtcaagctttctggctgtgaacttagtattttcaccaataatttagaagaaagtaagtgaagaaaaacacttaaataacctaatcttgtgcaaaatggggatttccttaagacaaggaataaggtgcaataatagaggaaaaactgctgcttttacttttctttccctccttgtctttccagcattaataggggctactttcctttctcaactttgaaatattctaaaacatgttcaagagaggattcataactaaaactggagactcaggatactagattgtggccaatctatcatttttcccactgtttgccattccctgagggtatgaggtgtacacttgtcagggctgttgactttggagtccgacatgtaactggcagccaaggtcgtgatagcagaatgtctggaacagaggttttaaatgtttttgtgtggcttggcttgtctctgacactgctgtgatctgcctgagaagagaaaaccccacatacttactagcataagggagaggagaatcaagtagggccaatctggaccaatctggtacctggaggcaagtccaacctaaaccggttgagcatagccaatatccagccacctggagcacccatgagcaagagagagagatgcttttagattcaggggctatttgttacactgcattattgcagtaatggctgactaatacatattctatttttaaaaactggggcatagcataaaatatttacaaaatgaataagaactgatacaattatctgggcctgatcctcttatctggtagatgagaacactgaggcccatgatgttgtaacttgctccaaagtagagaagggaataggatcaaggtcttctgatgctcagtgactgttcacactgaacaatggcagattacatatgatggtgggatttgtaatgtaccctggatgatgctgtctacctccattccctacatgtgcctcactcactgtccatcccacattcttccttcctgcttcaaagcttctctatcactgacctacgcttgccctacattgtctatgttttctgtttagtccatttgggctgctataacaaaatatggttctggagcctggggaatctaagaataaggccccaggagattctgtgtctggtgagggcatattctgtgcttccaggatggtactttctctctgtatcctcacatggtggaagagacaaggcagccccttcaacatctgttatgagagcactaatcccattcatgagagtggagttctcatgtcttaatcacttcccaaaaggctctacctcttaatattatcacattgggtattaggttccaacatatgaattctggggtgacaccagcattcagatcacagcacctcagaagctttaattgcgtgctggcctctgggctgttaggtgactcagttcactctgggataatgcaacattggttctgttctgttggagactggtgacttaagtgagtcgtctctttaaatcacattctgtttccatgtgtttgttttgttatcccaaatcactttccaaatctcagattggcaggaaatcctaattaaaccctttggggtatctcagctatgaagcctgtagttgatcacgtgttatcattagtcagctaatttcatatgcctcccttgcccatcatcactttcaggtaaataagggagaacataaaatgaaacatctggcacacaaggtcatagataaaatctactaccctcagaatggcctctgaaaatccagttaggatttagaattaaggttggttctttccagatgccagttaactgaacccttgctctgaagaatcctcatctccttcagaaaaccttcactacatagtaactatggaaatttgcaactaagactatataaaacatgcttgatgttttttgaaagagaagcatattcttgttttctctaatgacttggattttacagttcacactgaatgcaaataataagactctattaccttcaatgcaaggatcttcaattagtctaggaaactggtttctgtattagaaaaatatgtgcatatctgttaagatgaacacatggcttaatgagggatcaacttgcctgtatattagagtttcagtaaaatgctcttggttttggaaacaaaggtttaagaggatacgttagctttatattcttacgtgggaacttattacctgacagacatcaagaagtgatgtcaagaatacctaaaagctatttaagtttaaatagtaatttaggtttattaaaaccatattagttatttaggtctaataccactgtttacagtgttcctgaaagattattacatagtccaaataatggatactgatggtcattgcatgctgaaatgacctgctggcttgtctgcttgactttgtcatcaatcaaggcaactgtggactctgctaaggccatgtcatgtaatccaatggaaaggtccagtcctatggccactgggcacaaggaatgtcagcccatcttggatgttgtcagtggaaatctttactgcatacagtgctttgctggtcagaccccactcagtatccttccagtttatcttccgttaagcacccagggccccctctgcaaaaaagtgaaggatcaactgcattaaggaagagcgattcccagtcagtgtttctgtcaatattaaaaccagcaaaaaagcaaatgtgtttagtgtgtggtttacaatggccagaacaggctctggccaagtctcaaagtgaatttcatttaagaatcactctcagcaactcaggtttatggctctcccctcaaaggaaataattctactgactaccattaaataaacatatctgttttcaacttaaagtagagcaaccacatgttccctaagaaatctagaagtcttttattggaaatagtacttaagaatgaaaatataaatccctatgactttcaaagtcctgttggggaaatactaatgacagggccagccccaaatgcagcaaagatgacaaggtacactcacaaatagagacaggattgagtgatgctgaagaccccaatgtctcctctactgatgaggtagcctgtctgccaaggtgccctcccgcttggtcacctccttgtgttcctgtgctgtgcttattctgtcatgctctggcagagatggtgtgggatgcagatgagatcccttccctagcagcacaggggtcactgtagggaacccaccaatgaacatttcttcctcagggtggaggatttactaatcaggctaaggttgggcatgtaggtgaatgaaactcgactccttacagtctcatacccaagcatgggctgcatcatggaaggtggagattgctgcattaccatcacaaaacctaacactgacaatttccttctaaaagtcccatgactcattttggttgtaaaaggtctaggataagtaaagaccacgaacaaactaaaatgtacttattgtatttttcacaaacctctgaaatatttattcttttctgggtaccattactgttcgtgtgctttatggtttgacaacaatgaaccacctctatccaaggctatagtgtgtaagagtaacctatgatcacaaaacattactcaaattaggaaaaaaagtatttcagacattccagacccaatggaaagactgattctaatttacacagcgaaatgctatggcaaactttccttttcttggtttttctaataaaaaaacacattcatcatgcaacataactccttactgtggttatggcaactctgaatacaatacatttgtactttcagcaacaataatcattttgaaagaataagcacatttctgttggtggtgaatgacattaatttttttctcctaaatcagacagcttatctgtggtaggtgttccacaaaatatagcagcataacgaggaggagcgtgatgcttatatcgatcaacttcaaacctacttggaatttttaagttctatttttatgtgattgctctattcttcaagaccaatttactttgctaaagggcatttttgatcaattagatatttatttctacagttgttataatattagcctaataaaattaagcatttcttgtacatgttgaataaaattcaatataaaggctaacttccctcaataggtcaacatggaaatcaactgtgttttatagtctgtttattgtgtgtgatgattttgtgtgtgtcaacttgactggctaagggatgcccagatagctggtgaaacattaattctggatgtgtctgtgaagcgaggatgtttttggaagaaatcagcatttaaatcagtaggctgagtaaacaagatggccctcagcaacgtaggcacacaccatccaatccaatgaaggcccaaatagaacaaaaacatagaggaagggtgagttcattctctcttcttgagctagaacatctgtctcctcctgcaatggacatcgcagctcctggttctctgacatttggactctaggacttacactagtggccccccagttctcaagcactggaacttggactgggaattataccactgggtcccctggttctcaaatcttgagactcaggctgactcgcaccaccagctttcctggttcagcttgtagggaaatgatcatgggactgcttgaccttcctaataaataataatcaatctatttatctataataaatcaataataaatcaataatatttatcataataaatcaatctatttatctatctactttatctaatcttctactggctctctgatttctctggagtactttaatgtatgctgcaaacaaaatctatttcttttgtttttaggagtatattctcacaaaatcaattcaaaaatataattatgagagttttgtctctggatggagggtgaaaaggctaaatcttgttcatatttattttgttttcttgttgctgctataacaaactgccacaaacttagtggtttaaaacaacacacatttatttatatcttatacttttggtggttaggagttgaacttgagtctcactgaactaaatgaaggtgggcaggactgcatttatacagaagcctctgaagagaaaattattattattattccttttccagctttcagaggctgccgaaatttcttggcttgtggcccttttccccatcttcaagttcagcaccatagactctctccggccatcttctgtagtcacgcctccctctgactatgtctgaaaaaggtcttctgcctttaaggatgcatatgattagtttgggcccacctggataatagaggataaactctctacctcaaggtcatttaactgcagctgcacccttacttcccttttcccatggaatgtaacataacacaagttttgggaattaggatgttaggcatctttggtgggggagcatcattctatcacaatatttttatatacatgactatttctcaagtatattcctcacctgtaagagctgtacatcccacaatgtgaaattgtaaatgcatgacactaatccgtatccttgtattctcagaaatgaaagatgaaaagaaaacatccagttattacattcactttttagaaatcaaaataaacttgtacctcccacagatgttgatgtgtgaccaaaaaagtgatttcaggagtcatctatgatgtattgtctaatgctatattctaaacagtaatcaagcagttattttaaaagctagttctgctgcatcatatgacttatgcctgtgttcttctggtggcagtttttgttgaagataaaagcatgaaaacattgagccaaggtaatcagaagagctaacatctatatatcttttttacttctaaacttcttcagtttctttgatgaaacagtcttaaatttcttaataaagattaggcatactgtacctcataggaattttcacaattacattaatatatttgatttaagcctatttttaattaattctatacattataatagttgatggccaaatccacaatacataagccaattaaaatatttcttcaaaggcagaaataaaatttaatatgttacatttgattttttgtgtttcttttaagaaagttctgccttgggatacacaggagaaaaactcaatgaaatgttcagtgacatttctccatacacatcaacataaatgtcaatatgcagtgaaaagtcttagaaagctatacaggaaatggttaacaagttactctggtactcatttaaaaaaaaattttcttcacaccatggcacaatagcacctttataaaccaaaccaaacaacgtaacataaaataatacatctgaagattcctgcttgctttgatactgggaaaaccagcagaacaaatcacttttagtttgctgaagaggccgtcaagtacagatttttaaaatgttctagtcctggctgacacttgaaaatagatcccacatgtttttgatgtaccactgtttgccttcaaattctggccacaatcttattaattcattcacaactacatgaaactcagcactttgctttcagtaatgaaaaaaaatgttatttacccagaaacacaagcttgatggccttggaaaaaaatatttacagggataaagcccttgatttaggattcatggacaatgacttcagaacatttgatgaattgcccatattcacagcctacaacataggttttaattcagaaataaaatttgcttgcaaatgtttgagatttttatctttcataggcatgaagtttatctaagccatcagggctcacagggtctatgttacatatgattgttattgaatatactgagactttatcaaaggtaagttttgttgttgttgctgctttttaatgacagacattactatatctctgaaaagaaatgtataggaagcttcttactaaggaacgcatatgtaaaatttccagtaacgattgaacagtactatttgtttcttttttgcatcttaggatttcaatcttattttataaacgtgtgaatctctgcaggtcacctaccctcctgctcaagatatgttctgttggtgggcattctggccagttggctggaccattccaggatggatgaaaatctgtatgccttgtccttcaagggcaggcctacaaataagcatgcacgtcagtggagttgggggcaggaaggccaaagatttccgagatgctttgcaagtcatctctgggcattcagccccatcatccagaggctctgccccactggaatttggatcgcctgttgatggctgaggttaagttgttcagactccaaagggccacaatgtaagagaaggccagtctccagcatttataaaaaagaacaggaggtattttaatgaaaggagagcacttactattatggcccagctccccatggcactttctactggcttagacatcccttctttttgaatgaaacataaatctttataaaaagattagtggggctgctttaatggttatgaaaggtaacagacttggggtagtaaagaaatttccacatcaaacacatgagataattgagtgtttcttggttttgtatccatgtgatgtattcataagaatcctacacaattaggtgtgtggggctcgtatcatgtcatattaagtctgcaccaggtatatatagctgtcagaataaattccattaaaattgctttctcagttgcatcaaacatccatgtgccaaagcacaacaatgatagtaatttagccgcaactgtttccagaacacatggtggactgcctagaagtgtacaaataaatcaaatcactagggttcgaatttcagggtggctggaggatgtgtgcacgccagaaactatttggattattaacatcaatgcaatacccaagtgttccattattggaacactaaacatgtgggagttatttatatcctactgctcaaggtcatcatcaaagtctgatttttcactgacgcaaaaattcaaaaaaattgcaacctccagcataaatgggtttaaggaggtattcccagttcactgtggatactggttatgacagaagggtccctcaacagtcagcgctactgctgaaagattccaattgattacctccctgggactatgaagtaccgataggcccctcaaccaggagaatttcaaaaataatttttcctacccattatacacaaaatcaagatgattaaatgtggagaaaaatacatccaatgaaaaatacagaacactgtatagatacacagactatatgtactatatatagatacagagcactatataatatctataatagtatatacatactatgtatacactatattacacacacacacacacacacacacacacacaggtatcctggaggtatcctggaaaatactctgtaaatgcatcaatctaacttgtgaaataaaaaactgagtattcaaatctgatttctgaacaattacaccttttacaagctggttcaggaaacgtgtgcatcgggacataaagaggtttatgatatttagtgaagttaagaagttaaagagtgatatcgtatgcaattcttgttttgctcgtaaacatttttcaattgaaagtttagtttcaacagttactctaataacttattagcattatacaaagtataaaatatattacctgccaaatagtatcaagcaaacttctatattctatttcataaagcatacaatacagcactcatgctctagcaagcaggatgctactaggttatgtgatatcaacgtctgtgagagttccctaccaatagaaaaaaagaaactcaaaatgttaggatttagttgctttttttttagtgcatgatgcaaaccattctctaccaaggctcatagagccttggtaatagctgcaaagaagatgtgatctaggatttgtgccaagtgttatattctatacaggaaaatagggaaatctgtaaaattctggcttgggctgaaatcagtagtttatgcttcagttgttgaattagacataattaggtaattccatattaagttcagaatggcatttaaaatgagtttggatatttccagtctttctttgcctgctgctagacagaaacatggctgcctctctggttcctgaattttaaagactttgtgtgtgtgtgtgtgtgtgtgtgtgtgtgtgtgtgtgtgtgtgtgtgtgtgagatatatgtgtatatctacacatacatgcaaacacacataagtaatatcacacacttatgtgaattactgcataaaatcaagcttaatgtataacctttttatctgctttctgactttataggattaatatgtgataagcgtactcccttatctctttcagaatgtattctttcttgagaagataaggatggagagatctactgaaaaagcaatgcacagtcctgtcatattgtcctagcatgacataaaattccatggtatgtcacactaggaaaggtcacactgacaagctgacagctgcaatcctgacagattctgcactatgacaggcaaatgactttatgtcctcaatgcacaaaacgcctgcaacaacaaaatgcatgttttcctttgcatttgcaaaacatcccagaaagcttcaattaccctcaacgattttccagctatccttggggaccactgcccatgtcctgatccaacaccttaggatgacaattccaccatccatctgagcattgcttagtactaatgccaataaatatttgctgctgttgacaagagataaacaaaagtagaacatcaaagtgctacaactcttcttttaagaacagataatattcaattaagaaacatttatattgaaatgcttgaagcactgaggttatataaagtacaaacagtccctgccctcctgtaaaagtattctaactgaaaagctcaggagatgaactaattagtcactaacaagactaaaaggaagtaagagccttggcccttgaatcagcaaaggcatccattgtgtgtaagtacatcgaagcaggggatatgtccttggctgggcctatgcctggcacatgaaactattctactctccaacagggccctaacatgggaacaaggttcacgagtacaccccaaatacctgcctaggtaggataaagaaaaacacatcctaatgagcaaacttacggactgaaacagaaagatatatataagccaattagacagtctgtcaccatggcaaagtctgctcatgatgaatcagggcaattttctcttttttctaatctatatcaaatgtctaaactctcaccatgttcaggggactgttcaggtttcattcccagttatgaaaggcagtataatgaaacaatgaaggtgtcagaaactcagcctagtcacgtgttcgtatgtggctttagccataacatgtgctctgagtttcttttgttcttctgtgaaatgaagattacaatgcccaaattgaaggattgtcaaaaggatgaaatgaaaccatatctgtgaaagttttctgtgaagaccactctgaaacactcaattttcaattacccaattttcccactttaaaaaatgtatgactaaagcagaaaaagcaatataacaatgtaaaggcactatatagaacagaaaggaatccttctagaatgaagaggaaggatgggcaaagagttcacacggggaagtgtttaatagctgcagagtttatacaattcatctttgaaaaaaactaagtgatttccgtacatgcaaatcaccttcccaaatcaagggaaatcaaatgaaaatgtagaagtcgccacaagaaggtctctgcagtatctcaggcagaagcattcttctcaaagtagggtaaatatacagagaggaaacactaccaatggcttaatcacagactttggtgatgactttggtgatgggtacctctcctttcgagtgtgtggcaccataaaatagtaggagaggcagggccagataaattctatctcgacgtccacaagaatgggtgaggcagaggtcctcagaatcacaaactgcgcacaacctgctgaccttggtaggctggagagaagtgaagtggaacaactcacacagaaatgtaacctgatatcagaaggtacttccctgtaaatgggggatgactcctactaatctagttatgctttccccgctccaaataaaccttttgcaagtacctgatctaggaagacttccaccaaaaagcgagacatagatcaagaagctcccagcatgggattgatatcaatgtaatgtaagaccaggttcagagaagcactggaaaaacaagtggaacataatgctccaccagaaaaagtagttattgagccgacgaatcatttgaacgaaatgtatggtcatgaatgaaaagaactgaatgaagcaatcaaatagctcagagcagaggtaaaagatgaagttcagacgagagaaagatggaatataagctatcagaatacttgaaagaaaaaaagggaattaaaaaataaaaaaactgattgccatattgtaatcaacccaaagaaactagacactgtccagaagaggaagaattgcattagaaacataaaccaagccaggcacggtggctcacacctgtaatcccagcactttgggaggatgaggctggtgaatcacttgaggtcaggagttcaagaccagcctggccaacatagcgaaaccccgtctctactgtaaatatacaaacattagctgggcatggtggcatgcacctgtgatcccagctactggggaggctgaggcaggagtatcggttgaatccaggaggtggaggttgcagtgagctgaaatcaccccactgcattccagcttgggcaacaaagtgaggctctctctcaaaaaacaaacaaaacaaaacaaaaaaacgacatggatgatagataaatagattgatggattgatagatgatagatagatgataaatagatagataggaaaaaatattcaagggagagagacagggaagaagacaaggagattcaaaatctgcataactggtgtgctcggggaagagcagcacataaatgagctaaaaagtattaatatacctaatgctaaatgacgagttaatgggtgcagcacaccaacatggcacatgtatacatatgtaacaaacctgcacattgtgcacatgtaccctaaaacttaaagtataataataataaaagaaaagaaaaagaaaaaagtattaaatataatttttttaaataatagagaagtatcattgcaagaaggcttgaatatgcagatgaaaatgatcacaatgccctaagaatagttgatattaaaaatttagcaagaactgtatctaaattagtatttcattaattggacttttgtagataaattataattagaaaaaaaattttttagagttcacttaaaaaaaagtaaattaaaattacaccaatctcagattttctcacagtaacagtctacttatgaaactattgggataacatctatgaaattctcaagaaaacaaaatgttatacccaggcagaataacatttaattatatgattacaggtcacattttcaaatgggaaaataggcaggaattgcaggggctgtaaaatcttcctgacaatcagaaaaaaaattagctaatgagaaaatgaggaaagaccactaatattgaactctagctaacgatatgtatgctaacgtgttcaaaggtaaagtcgattgctatctgaaaattattgtgaagtgcaatacacttcacaataatacaaaaattattgtgaatacacaatacaaaaattattgtgaatacaatggaatgatgagtgtcactaaatggatagctaataggtaaagcaaatattgcatatattgattgtacaatccaggtaatggttaatgggtgctcacaatacaattattttcatatttctatatatttatgacttttcataataaaatgatgaaaaatcacaaaaccatagcaaagtattgtctctccacatttattctatttaactatagtattaggagtaaaatatctgtggaaattactgtacagaaatcaattgtaaatcatggcaatttagaattactgtaacaaaagtccataggacaaagaagatgagagataagggatagagggatgcctatacaggaatcaaatagattctttaatggtgataaatcaattaatcaagatataaatactggaaaaaccaataaaaatataaccaagttaatttggggagtggcatacttagaatactttataatttcatctctggccatagtgggaagttgacactgtatttggaaaaagaagaaggctggctgcgcatggtagctcacacctgtaacctcagcacttcggaaagccaaggcgggaggattgcttgagcctaggagttcgagaccagcctgggcagtatggtgaaactccatctctaccaaaatatacaaagttagtcaggtgtggtggcacatgcctgtggtcccagctactcaggaggctgaagcgggaggattgcttgagcccgggagtttgaggctgtagtgagccacagttgcaccacggcaccccagcctgggggacagagaaagaccctgtctcaaaaaaaataataaaataaaacaaacaaacaaacaaacaaacaaaaaaacctgtattatatcaatttgtaattacagagttagccattataaaaactaaaaacatcccacattttcatattatgaaaagaaatattgcacacacttacacagaaaaagaggggaaaatgcaaaataaagatataaagagaaagaataacgtaaaatatgatatttacaatgtgaatgtgctacatatgcctccctttggaccacaaacttaactatacattgttgtggtaagttttaaagtatttacaaatatcaaatattaataatgtggaaaggcaaatcaggcaaattggaaaggaaagccatggccatgttctgagtagcagacacagttaaaacagggtagaaagcattcctgtgacaaagcatggccctttatgatgagtaagcatatactcagcaataaacatgtaagaggtatgaatatgtgcacacgatgaaaatattacatcaaatttaataaagtgaaacctacaagaattttttaaataggcagaagtatgtcaatagtgagggacttcaattcacatctctcagtccatgactgacccagtatacaacgaaagaaaaataatgaagatttaaacaacatagttatatctatttgtactttacctaattctataacctaaggacagataattgaccttccttcccagcaactgaggaaaaaaatgccaatcttgaagacatgctaggtcacaaagagaagttcattaaatatttccccacaaagttataacttatcaggatttatgaccaagaattcactcttgaattacaaaggaaacaaaaccagagatcgaagaacatttacaaaagttgtatatgaagtagaacctaggtaatatgttaaaagcaatgctcaggagacattttaagtctcgtacacatacatatgtaaataataagaaaggatgaaaataaatgacataagcatccaactgaaagaactagaaaaaagccaataaaatatgcatgaggaaagcaaaaggaacaagttaataaaaacgtaaatacaagaatgaatgcatttgaaaacagaatcatgttagacctattaagtaaatgtaaagttttaagataaaaaattagattgttgattaaacatcaaaagcaaaaataatgaagatttaaacaacatagttagatctatttgtactttacctaattctgtaacctaaggacagataattcatattccttcccggcaatcaaggaaaaaattgccaatcttgaagacatgttaggtcacaaagagaagttcattaaatatttccccacaaagttagaacttatcaggatttatgaccaagaattcactcttgaatcacaaaggaaaccaaaacggtgactggagaacatatacaaaagttatatatgagagtagaacctaggtaaaatgttaaaagcaatgctcaggagacattttaagtcttgtacacatacgtatataaataacaagaaaggatgaaaataaatgacataagcatccaactaaaagaactagaaaaaaaatcaataaaatacgaacaaaaaagcaaaaggaacaagttaataaaatcataaacacaagaatcaatgcattcgaaaacagaatgatgttagagctattaaataaatcaaaagttttgaaataaaaattagattgttgattaaactaagcaagaaaagaagaacaaaacaaaattagaaatgagaacagggaatgaatcagatagtgatgaaattaaatgctagaacataccattcgataagagaaggaaattaaaactgtgcatattaaaaaagaaaggaaattaccattgtttgcacaaaatataactgtataaataaaaagttcatgagaaccaatggaaaaactcttagacatggtaaagataattcagtgaagtgactgagtaaaaagtaaaaagtaaataggttgcctaagtatgtacaaagaagcatgctttcagatccaagatccatgcacaatagaaacaaaaagcataagtataaaaaatgtgtacaaaccatatgaacagcacgttgaaatgcttctttactacacaaaatgaccattgagtaagcggaatgcagactctacttaagatgggaacacaatatcctaaagaaagcaatgcatgaattaatctatatatttcaaacaactctagcaaaatatgaaagatatttttttctccagcaaagtaatccagttttaaagtaaacatgcaaaaacaaccagattttaaagaaaacctgccccccacccaaaaaaaaagaataaataaggtagcaatcggtaggaaaaacagaatcaagtatggataaatggtgttgaggcaactggaacttgtggaaaaaactaaaattgcattcctatcgaattcatcaaataaaaacaagttccacgagatcatgtcctttgctgggacacagatggaactggaagccattatcctcagcaaactaacacaggagcagaaaaccaaacaccgcattttctcacttataagtgggagctgaacaatgagaacacatggacacaaggaggggaacaacacacactggggactgttggtggcattggggaaaggagagcatcaggataaatagctaatgcatgctgggcttaatacctaggtaatgggttgataggtgcagcaaaccaccatggcacatatttacctatgtaacaaacctgcacatcctgcacaggtaccccagaacttaaaatagaatatcattaaatgttttaaaaagttggaagaaaaaaataaaaataaaaaataaaaacaagttccagagatacaaatgacaaacataaaataatgttattattagacaaaaatatgggaaattttgttttctgtagcctaagatagcaaagatctgagtatgatacaaaattatgattccataaacaacttagaaacttaaccacataaaaaataattatttacagcaaaagcaaaaagtaaacaaagtaggaaaatgttttgtaatttagaccacagaaaatagatctttccttaaactgtgagtaaatcctattaattatccattaaagaaaaaaatcaaccacccaaaaacatgatggatgagggacataaatgggtagttaattgaaaaggaaatatgattgctaagaaatgtgtgaaaagatgctggttttcttcaaaagagagatgcaaataaaaaacatgaaatgttattctcaactgtcagaacggcagaaataataatgctgggtgacatgaatcagccaaagagatatggaaatacacattctcatagtactgatggaaatgaaaatggataaaatatatacagagacaaatttggcaacatctatcacacgtttaaagtgtatataacctttgattcagaagactcacttctaggaatttatacaacagatatacggtgcatatgcaagcttattgatttatacgactatcagttacagccctgttcatagttgcaaaagaattgaacacaaaatattcatcaataaaggctagctaagtaaatgaagtatattcataaaataggaacaatgcagctgtttaaaagaaagaaaaaacatgaatgaagtattattcacataggcataatactttaccacttctgcaaataaattatatatttgcatatgcttatacatgcatagagtagctctgaaaggatacccgagaaactggtgtttgcctatgaaatgaggaactgtgtgactataggcagaaactcttaatacaattgcaaaagatgaacattataacaataataataacattttctaaaatcccttttccaggacctggcacacatacatatgattcattacccacagtaggtagccctgccacaaatactgtgaggtagatactttatttccctgggttccagcagtttagagaagttaaatgacctgctccaggtaacccagctctaagaggcagagctggtttcacactcaagcattccagctctggggtctggggggaggcaggtgtgacaggtagaataatgtcccaatccccccacaaatacgtttgcatcccaatccgcagaacctgtgaatgtgtaaggtttcatggcaaaggggagttaaggttgctcctcagctgactttaatgtagggagattagcctggattatccacgtgggtccaaggtaatcatgagttcttaaaagtggaagcaagcatcagagccggcgatgcaatgtgaaaaagacttgaatggccattgctggctttgcagagagaagggactaatggattgtgagtcaagagctgcaagttgtctcaaaaagctgggaaactcaagcagaactgctctagagcccccagaaagggacctagctctgccaacaccttaattttagaccactgagagcatttaacgctctggacttctgacatccacaatagtatgacaataactttgtcttaagccacttaggtgtgtgctaatttgttaaagcagcagcagcaggaaatgaatatggcagaaaagaatagaaaaatgaccacaggaagataaggaggcagtagggagcagatgggatttttaacccacgtctttcctcttggaactccttcctgcaagttcagataagaaaatttcatgcagggaatataggagatcccagccataccacccacaaacaggaacccaagagtacttctattagagcctggtacagaggctctcatgatgtggcaccaagaccagtagcagaagtgtcacctgagaatgggttagcaaatcaaattcttggacccatcttctggcagctggaataaaaatcttagagccatggctaacactctggtttgacaagtcctccaagtaagcctgatgtgatgcatgcctgagaaccgctggcttaatgtagctcttggtttagactgagcaaggcatccaaaatgttactgcacattggaatcacgtggagatctttaaaaaattttcacatctttgttgcacccaagacccatggaattagaatgcttaggcaggggaggtggcaataaagatccccaagtgaaccatatgcatgacagtttgaaagcactggtttagagcaatagttctcaatcttgatacattgaaaccactcagggccaattaaaatgtatagatacctgggttccatccctaggtgatctaattgattggtttacagcctgagtgtcaggaatcttaatccctagatgattctaatgcaaccctaaggtgaaagctagagcagaattcccacttgtagcacctgatcagagttaggtgccacatggtaaatgtgggggccaggagaagagtcatttcccaacccccagtcatttctgaaaagtcaactgatattcaactttgcaaaatagaaatgttaatcttatttttattccatatagttcaaagtattttcaagagttgatttattgtatcactgcaattgttgctactatttcctctttgacatactttctgctataaggagtgctaggttgaaccatctgaaattgcttgattggtccacatttgacatataaaacagcaatttcatattattcagcctaataacgagcattgtaatatacttccttaggatactaaaatgatggcattgagaagctcattattattgcacacctactagataatggcttgcaagcaaggagttatctgggaatttctaaaatgcactttaaaaataaaccccaaatgcctagtttaaatcacatgtggtgagctggacatagctgaacatccaataacaactatgcccagtgccctgatattcttctgtccatctcaatcagcatcagaaatgcaagcctcactgctcataccgagaccacccggtattgcactgaatgtctgctcatttgtccaatcaccccttcttccatcagttcttccagtgtgttctctgaaattcccctccaatatcagcagcataggctctgatcatccccactttccccaggtcttaactgaaacttgggcatcctctgtagacccaatctcaccccatcctttgcaacataggctgctgctcttcctgaccttcatcaggaccagataaagagaaggtccatccttggtccccatgctggctttcaaatcacagattggcaccacccatccatgtgcaggtccagacccctgctccttagaggctggttccagaaggctgcaccatcattaacatctgcttccagcctctttggcatccttcttgttccctgagctccatcatttgtcttctcatccctagacacccatcccgcaactgttggccttacctcatacttcactagaaagcacctctgaaggtgagcacctccttttctgaaattcctctcttttcttggcttctaggacaatccccctctaacctctcacctgataaaatgcccactgctggttctgctttgccatctcatccttcccctccaaacatcaactagagattctccagctgtttcctgaaccatctgcacactctttcctgaggtaaccatatccattttcatgattttaccatccacatatgaatttctcccacatttctatctcccaagtctctcttttgaactctgcagcctgactgcttccttcacacctctacagaggttctctgaatgccttggaggctccgggactgttctgggaacatcaataaaagtaaatcagtaaatcgctgcccacatggaccttcctttcaatgcaggagcagggagcaggtggagcagggagattgacaagaaacaataaacaagataaataaactaggtagcatgttagaaagtgatgagtacaatggggaaaaatagagaacaggctcagaggaaggtagaaactgttcacagtcacttaaatgtaaggttcccaaagctgagcctcagttcatgactccctcactttagaacccccatacacacaaaggcattgcttttcattctatctacaagcactgtccaagcaaaaacaaaacaggagtcattgcgactcttcagttttcctcacttgcaacatcagggtactcctgtccagcccacttttaaaatatatccgacttctacccactttcctccatctttgaaagagccaccctgttcagtcccaagtgcacctggattctctgcatctgttcctgttccgtcactaattcattctccccagaaccatcttttttttttttttttgaagcagagtctcgctctgttgccaggctggagcacggtggtgcaatctcagctcactgcaacctctgcctcccagatccatgcaattctctgtcctcagcctcccgagtagctgggactacaggcacacatcaccatgcccagctaatttttgtatttttagtagagatgaggtttcaccacgttggctaggatggtatcgatctctttatctcatgatccgcctgccttggcctcccgaagtgctgggattacaggtgtgagccaccgcatctggcccagaaccatctttgaaccatgtaaataaaattgttttcgtctgtttaaaatgcttaaaagtggctcgtctttgcactaaaataagatcccaattcccttcatgtacatataagatcttgcaagatctggcatcagtgtgtctcttcaacatcctttctcatcaatctatccttctactacttggcttgggatgtgttgtccttttgctgcacgaaacacatgaaatgcttcttggcctcctttgcacctgcttttctctctccccacaatgctgttattccagttatcatgagcggctctttctcttctttcaggtctgagcttaaacgtctcccaaaagctctgtttgaacatttgatatagaactgcatgtgaaaaggtaccttcaatgatgagtaaactgaggcacccaagtgggttaaatcacctgttcaaatggatccagatcaactacagaagctctgttccattaaaaataatgagacgagccattcatctcatttcctttagagcacgcatgtcccacccgtggcgtgcaggccacccgcggcccaggacggctttgaatgtggcccaacactaatgtgtaaactttcttaaaacatgagacatttttgcaatttattttagttcatcagctatcattagggtattttatgagtggcccaagacaattcttcttccaatgttccccagggaagccaaaagactggacacccctgttctagagaataaaattatattctctctccaaatgccattacagcttactcttgaaatacttgagaaagcaacaatgaccccttgttctgacaacttgtttgattataaacacgtttggtaaaaaaaaaaaaaatattttcagcaaggttgtcaaatctgcagatctgtttgtttttgaaggcatagaaataagagtagcatatccttgctgttttgggtgacggaatcatgcctgcaaaaatctcaaaaagactgtgaaacatgcagatgtggtcacaaggagtgcaataaaaatggaactgttgttcagaaagaaacgccagcatcccacagacatatgtgtggtcccatctgtgattctaaattcattgcttatgaacaactaaggagttgctggagatcagaagccatctctgcttttatcccttcagaagtaaggcggcatgcagctggatacatctacccctcctagaacttgagacaaatgacattcactcctgtctagacccaagacctctcatgccaatatcacttttcattcctgaaactctgatttaaagagacaggctctgaggccatcaacagttcctacctgatggttgattgttgatccacgtagccccagggttacagcactggaagagaccatgtactttagacccaagcttgagagcctgagtcccctccatggcaattctaacaagtgtgtttccatctccctgcttgagtactcacagtgatgggcaactcactgcttatcaaggcagtccatttttaaaaatagtttttaataataatttatttcttaaatggacttgaaactgtttgtttgttttgttttgttttttcagcttccgtttctccctgcactgtccaggtaaggaatgtgatcctatgacaaagaatcccttctgacctctgaagacagctaacacacctcttttcttttttcctccaatttaaatgccttcacttcattgagggtaacatgttataaatttctatgggaccacctcaaagggcttttgcattgctgagagtggacaaggttccaatgatactgtggcttctcccggacaaatacatgcatttgatttttgccagtttccaaaaacacttacaagaactgagttgaacctggctatcacttttcaaatttacattgttttcctaatgcaattacatttttttcttgtttatttcactttgttcatctgttgattatttttaaatgcctatactttcaagaagtttaaaataactagatcttgagaacctagaacataagccaaagatgtatgtctgtagctaaagatattttggccaccagagggctcccagattttgatcattattactctacctgtatttaaacaatcaagacaattaagtggacttatagaaacaacaaatttaaatataagctgtttctgacacaaagataggtcacaaatttttagaaacaattttatttgcctttgcctcttaattccagcacattaacttcttaaacactgtgcatatacacaatgatttaatccccacaatcttcttaaacacacacacgcacacaaagatttaatctacaaaataattagtcttgatctctgtaaacacatttaaatgttttatgacttacttgtctatatctgcagaagttttcaaatgactattttgtgtggaaagaataagtgttctgttttcaggaatatgtagctttctaaaagtacgtatttagaagtatgaatgatggcataaaattgacttgtatataaaattgattaaaaaataacgcttaatgtcaggaagtgtaagagaagaatcaacacttttatacatactttccagaaatgaaacttaataatttgatatgtctttgagggtaatttgttaaaatatggaatattgtaaaatgtacacgaatttatagtaagcagtaacttatctaagaattgattaaaaaatacacaaatattgggattttataagcaattttaaaaatagtaaaagtaaaggaataaggactaaaatgtcatcaattatgtgaggggaaaataaatcgtgggaccccaaaatcactaagcccaagggaaaagtcaagctgggaactatatcaggcaagcttgcctcccattttattccaaaataagatagctacaaagattaaccaaaaaaaaaaaaaaaaaaaaactacatagctccctcacaatttgcccactaggaaattccttgcgggccccaagatctttaccctaaaatagttctgttgcatttcaccctgacgagataaattgatagcttatcttcacaggtgcgggacgaaggacagaactcagtcattcctctgcccatctgagacaaatgcacatctgatttgcttcctctgccctatgtttattttatcttatgtaaaaataaagattcactgaaatttaaaattctctttctctttccccaatatctgccctttctcctttaaatccccaaaccctcaaaatcatctttggaggaaggcacagacctgtgtcctgggtgcacctcctcaatcgattgagacctgtctgagatactttttggtttgtaataagaaactagttaatttcatagcagagacagagagaggaggaagagaaggagcgagaagagaaaggaagagaaatacactatttcagagacttataatatttcagggttactatgaaatgtccatgaactcaagctcaacaatctgaagtcagggagtaaatggaaaaacagcaaatattgcacacaggattggggagggggaggcctcaaaggttttggggtttggagtggggcaagggctgaacaaggaggggtttcctgaaattctgcgtcctcgtgccccgcctgcacattcagctgcacattatgctgcttccagaagcatctcgatagcctaaggggtttattctctggctaaactgaaacagattattgggtatttaagatggaagtgtagatattttctgaaagttagtataaagaaaagaaccaaaagtcgaaaatttctgaactgtcaaaaaggaggagatttgtacaacaaaataataaagatttaaaaaaaaattacctccatccaggaggtctgtttgaacagtagaaattccagcgggagagaaaggtggaaagagtaggaatggtatcatccataaagaaatacagggaaatcaccctacattgaggggcaggagtgtttgcattccaagatgccactcagtgcccagcacactacagccacacacaccttcataaagttacgggacttcaggaataaagagaatggcctcaacactgcccacccaaaaggaagaaagtgaacttacacccgaaggtcagcaatcagaactataacaacccctaccctggcagctaaaagacaatggagaaatcattccctttgcaatttttaaaatttctaagataaaaattacttccaaacttatattctttttgcaaacataagttcttaaaaatgttcttctcatgcatcctttctcagaaatgatggatggtatgtcccgctgaaaggagggagaaaaaaagacatgggaaagcacaggatttaggaaataggaaatccagcataggggagacatgagaagaatacttaaggtggcagccccttcagattggaggctggtagaggggctcctggagctgtctctgctggaaaaacaaaatagaataaattccctgacaaagttgaacatgtggaaaatcattttgtgctttgaagtgtggaaatgttagatgtttaaagcaaaaaggaaaaatgtaatcatagcacacaacttggcttgacacttaatatttacatgattataatagatttaactaaaatgtaagacatactgggaggatgggaatatgggcaaagtgacctaaatttctgaaccatcacaatatgaagtcaataaatacatgaataagattgaaaaaaattaaataccagaaatttagttaaaaaataatgagagtgatttcttcgtgggaggaaaacggggaatgcattctcagttttttgttgttataatttctttataaccatatgacattaaaattatttgcatgtagtgtttgactaaaaaatttaacaatgaggcatatgtagtccatggaaaagtgctgtaataggttcagtggaaaaaacggttttagaataatgtaatcccatatattttcactgcaaaatgaaaggagaaatctattccaacatgtttaaaatgttaatctctggggcatagaattacaggggcctcttttatcttaataatcatttctgtcttctgagtatagcacatcaatttttaacctcaataaaccacaatgacgtaagtcatgttataattaatataaaataatcaaattggtatgttttatttcaagtttggatgcaaaagaaaaaaattgtgtaacttaatacacaaagcttttcagccaatgaggattcagtaactacgactaaaaccaagagtgctgtgagctcattaatgttacgtgtctgccttgcaggaaaaagctatggaaacacaatattaaagaaccttggatcctaaactgtatgccacggaaacgtggcaggcttacaataacgtcctgccaaagccacctgtgccatttggtgcctccctcattggagcaaggtttgcttctgcgaggctgtccaagagtccaagagctttctgccctctcttctccagcgccttcaactgaacagcattttgagcccaacacgaagcttactcttagtcatgcacctgaagtgttttgtttattaggtttttgagacaaagtcttctctgtcacccaggctgaagtgcaaagtggcatgattgttggctcactgcagccttgacctccccagctcaagagatcctcccacctcggcctcccaagaagctggaactacaggtttgcaccaccatgtatggctaatctttgtattttttgtagagagagggtttccccatggtgcctaggctggtcttgaactcctggactaaagggatcctcctgcctggatctcccaaagtgatgggattacaagtgtgagccacctcacctgggcatttattaaaaattactattattatggctaacaaagaacttgcaatattgattcagtagtcttagaatgccacatgtagaagacaaattacaaattatttttgtctagcaattttcttttcattacagacattttcacggttttcctccctagaccctagctgtcatattccattttctctagccatttctttactggtatttttctccctttaatgtgtcagagcggataaaaacataagtggtaaagattcagaaacggtagctttctttctctaaggtttagcataaccaacatgaacttcaagcagttagctgcaaattatctcatcaactcgagcactttacttctaaagttctgaccaatcctgcagaaaaagtcatctgtttgtgtgtcagagaaatatgcttatgtcaactctaagaaaccacattagggaaggaagcagggggaagtgaacttcactaggtagaggcctttggggccactccttccttccacaactatggggctctatgcctccagccaccacagctaggcagtggtagggcaggttctagatcttaggtgcagcaattttaacccagtgcttttaaaacaacatcagtaactgattatgcatgagacagtactagggttacagtctgctccgagggcttggccaagatttaataatgtaatcctccacaacaacctgatcagctggctatgatttttttcttattttattgctggagaaactgaggcaacagagtgtaaaccacctgcccaaggacacgcagctggaaagttctggagccagcactggctcccaagtagcctggtttcacactcctacgcagctattacacaagctctgacttaggagtgatctgctctaccattttatcagtggggacagcaaacaggagcagagattttattttactttacttaatttttatttttattttattatactttaagttctagggtacatgtgcacaatgtgcaggtttgttacatatgtatacatgtgccatgttggtgtgctgcacccgttaactcgtcatttacattaggtatatctcctaatgctattcctccccgttctccccatcccacaacaggccccggtgtgtgatgttccccttcctgtgtgcaagtgttctcattgttcaattcccacctatgagtgagaacatgcggtgtttggttttttgtccaaaacagagatatagaccaatggcacagaaaggagcagagattttctaaacaccatgttacttgcccagtgacagagctgtccagagctcagcctcccaaccctcctctctttgtggcagttttagttcattacatcacttaaatgtcaatggaatgagaatgtgtctgtgcataaatacggtgaatgtggacacttcattcttcagtgcttagactcagaacagatgatgtcacattttaaaatacgtgttctgaagaagatgggtgtacattaccttcatactgaatcaaattttaaattcactaataactattgaaagcaatccagaagcaaacccgtaaaactaaagaaaacttttaggaaataatcatattttaatctatcatatataaattctaattttcctaattgttaaaattttaatggaggtacacatgcatcttgttgtattggatatactgtttcccaaatgggaaaaatcatagtaaaacttcattttgaaataatgttattttggatttgtaatgaccaaaatcattaggagcttagagctttaaggtgatattgcagatagttcaaaattaaatggatggacagtcgatttggtttgtttcacttgtgtgtctgttttggaggagtggtttttttaaatggtttgtgtgtttaaatgtaaagtttttttaaaaagacctcatactcatttctcagagcaattatctgaggtgtgtcacattccatccccttctagaataacaattctcccaatatgcatgtgtgatgcagaaaccaggtgccagttaatgcacatcactgtgtggagagaaacgagaagagaaagggtgtttggccatgctgatggtgcaaacacagctgtgcacttcatatttttgttgctaaggtcatatgggtcagccctctcagtgggctacaaacccatttccctggcaaagcggacggtccatacggggcacggatttatttgaggagaagtatccatgttgttctgggggaataaaggggctgttcaccaaccaggcagagaccttcctaaaaagcagccatggcaactcagtttacctgcaagcaagaattgccagctacggctaggtaacggctcttaactttttaaaaactaaaggagagcagaatgaattagaaaagcagaatgtgctgcaggcacaaagagtggcaccaagagtggcacattcattttggacctagaggtggttaaggttatactgcatgtacaatttgaatagacaaaggcaagtactggaattaattacaaagcttattgggaatccaccagtgacataggcagtaactaaatcaagagggggctgagaagccatctgacaataacggccaacctaatggctgccatgctttccaacatgatagactgcggatgccgaccccttagataatagcctggtgttaacaccagcgcaaatatgaccaaaactgagggctctgaaattgggcagcggtcacctatcaggtagatcatacaggttctatgtgttacagaatgtgcatatacaactattgtcagattttgttatgggctgcatgatgtccctccaaaattcatgttgaagtcccaacccccagtacctcgggataaggtatttggacatagggcctacaaaggggtgattaaggtaaagtgaggtcatcaagatgagccctaatccagtatgactggtgtcattggaagaggtggaagtgagaacacagacacacacggaggacaaccacgttaggacacagagaggaggtgccatctacagtgttggaaggaaccaccctgctgatagcttcgtcttggacttagagcctccaaaactatgagaaaacaaatgactgctgttcaaacccctgctcagtggcatgtttttgtggcagccctagcagatgaatgcagacgatcatcaaaacaaaggcaagggccaggtgtagtggctcatgcctgtattcctagcactttgggaggctgaggcgggcggatcacctgaggtcaggagttcaagaccagcctggccaacatggtgaaaccagttctctactaaaaatacaacaattagctgggtgtggtggcaggcgcctgtaatcccagctacttgggaggctgaggcaggagaatcacttgaacctaggaggtggaggttgtagtgagcagagattgcgccactgcactctagcctgggtgacagagtgagactccgtcttcaaaaatatatataataaatattaaaaaaaaacacaaccaaaaatacaaaggcatattcagtactggaaaattccagaaaatggtccaagcaccccttggcatgttcctttgcagcatataatattccatttaattgttttttctttctttcttttattgtaggcaatacttttctttgtccatccagaatcctaacaagcattgtaaacaaataaacacataaaatagctaaaaatggagcagcagccgcgggagctgccgccctccccttcccccctgagctggaacagcccctggggctcccgcagagcagagtttgaaaaatgccgcttccattctggtgcctcacaaagatctaacatgtcagcgaattacctcaggtttgcacattatcattaatcaggggcatcacaggggatggcagcatcccccagacataataaataatggtgaactcaaggtttctgcaggcgagtgcgtgcgttctgcctgggaagggcagtccgtgtccattagagactgaggggaacgttgttcttgccgtgtcctctgagggttcccacgacgagaactgcgagggagccctgctcattcagagacccagtgcaggcagacccacacctgggcacctaggccagagaccttccatggagctctgcaggctctcagggcttctgaagattggcatctctccaggaaaaaaaaaagcccatcaccccaaacagtcagtaggcttgctgttgcctcacctaccctggatgctgaagttggagagcacttaaggtttccagaagtttctccagccagcaagatgctccaccctcctccttcagactgtcgtgcgcaattaatgacaagctttcatatctttgattgtgaaggtgcattagcacttcagctggctcctctgggtcactcttgggtttattccacgtttaaaccttcaaaatctgcttttatttaggtcttggcattcaggccagtgcccttcagaaggacacgaggatggcccatcttccagggctggactcagcccacctaactggctcagcaagatccctgctggtgtgaaacttgtcacaggatgtggcagggaggcttctcctagaactggactggggcccccttcgtcatgattgtagattagagtcaggggctctttgtgtgaccttcgtcctggcctccttatgatttgaatcacattttcctcagtggcttgatcaatgtgttcattcacgaaagtgctgactttcccatacaaaatggtcagcctggccgggcgcagtggctgcactttgggaggccgaggcaggcagatcacaaggtcaggagttcaagaccagcctgaccaacatggtgagaccccatctctactaaaaatataaaaattagccgggcttggtggcatgcgcctgtaatcccagctactcaggaggctgaggcaggagaatcgcttgaacctgggaggcggaggttgcagtgagcctagatcgtgccgtcgcactccagcctgggcaacagagtaagactctgtcttaaataaataaattaataaataaaatttaaaaaaaaacacatcagcctattccatttgagtagtttcaagtttcttttgtgtgtaagttggtatttcattccatttttgattttgtaggacattcgaactatctgtcaggttatccaatcctattaggcttctttcctccacaagtgtttcatctttgggtgggtgcttcactcccatgctgtactaaccacctcatagagaaagggactataccagaaatgtccttgtatttctataggagggtccccatttgggtgcttcactcccatgctgtactaaccacctcatagagaaaggggctatgccagaaacgtccttgtatttctataggagggtccccatttgaaggcccttagtgaaggtatatcgataattttagggagataatatggcatgagaaagggcagtcaactctgagtttgagctacagctcagccattcatcatggatacgacttggaccatttcttaactttcctgagcctcagtttagaggctaatataacccattgagttgttataaggctttaatttttagataacattaatatgcatatattgcatgcaaaatgcacaggtaagtgtctggcacatagtgatcaatttatcataataatattgatgatgatagtgacaatcacaaacatttaataagaggtatgtttaaaatagagtttgctcacaaccttatcagctaaaatgtttgtggtcttaactaaacaatgagctttcgaatgtgcttaaggtgaggacagaagggactctaggaatttcagaagactataactggggagttttgggggaaagaatttattctttgctgactaaccattggttaggtggtgggcagggcaggtcatagggaaagctttgatgggaagggctcaaaaatcagtcattgtaggctatgttatacagtgttccctgctaaggcctcaataagaagaatgagtggaaagttctctacgtgaacaatccaattaaccatgaactgccaaaaaaaacttgagggaaaattcagagagagtaggaaaaacgtttactttctcaccttagtcctgtgaccataattttgcaagccaagacctgataaaaataatgttcattttaaaatttaaagtacaaataagtatattttattgcatgaaatttggaatatttgggaagagctcaaagaaaacaaaagttatataacttcctaaatagtatttaaggaagactgcagtcagcccacaggcatttaggatctcaatgtggaaaagtataaaatgtgttttaatttaaaaagaaattttcaaaatatacctgttcaaacctcattcatacaatattcacaaataaagaggaatatgaattctttttcactgaatagtctagaaaaataaaaccagctctctatctgccatagaaaatcagaaattgatctaacaaaagataagaaccagaagaaaaggaaaagaaataggaaaaaggagataccatgcttaacacacaaaaaaggagatagttaaaaaatgataatggcaaaaaaaagaaaacggtattttttctgatcgtcttttctatagtagaaatttgcaatttctcagatgctcagtattgaagttccaaaggacgtgtaaatttccactgatggccgtgagtcatctataattatttccaccatatgtacttacatcctttccagagaacctgcccattaaaacagcatatgaaacttagtaagtttcacttttttatgttttggaagaaagtgataaaacccatactacttgaggaactgaattacacacagtgtttattaacactgagaggtctgcttttcatttgagcacaaatttgtaattattttagaatattatcaaaatgatatatttaatctaaaatccaatcatgcattttcatttaaattgttaacattttattcagtattttaaaagataaaataacaacattttctccactgacatttttttctgtctttttaaaaaacttgtcagtaaagtgtaatatacctagagaagagtacatttaactgaatagcccagctgaatcatcaccaactgatcccacccatgcaacccacatttaggtagagaaaaaaaattaccaggacccctgagccccaccccccatgcttctttatagtcattactcttctttcaaagccacccagtatcttgatttctaataggataggttcgttttgcctgttttggaagtttatgtaaatagaaccacacagaatatattctcttgtgtctgtctctcttccttcaacattaccttttcaagatttatccacatggttgtgtgtagttgttggctgttcattctcatttcttagctgtattatattgaatgaacataactccatttagctgtttgggggaatttgcatagttttttgattggagctattatgaaaagtgctgccaagaacactgtatatgcctgtgtgtacctgggaacctgtagtacatgtggacataggtaaatatttttttcttttggggacatagctgggagtggaatggctttgccatagggtaggcacagagccagcttttaaaaagattggtcattttccaaagtgattgcatgaccttaatttctatgcaccaaataaaatagcaaattgtaaaaagttacattgtactaaaattatagccactttttgttacatataatcttcaaaatatatggaacatcctaaaaaatcagttcttggccaatagggaggatttttaatttcaggtgttgaactgagattttgagcaaagaactataaatctaacaatgatcactactgttattactgctactaccacaactacaactaattacaatgactgcaacaaaataacaaatacagtagccctgccttatacacagcttccaagacccccaatggatgcctgaaacttcggatagtactgaatcctttatatgctttgtttttttctatacatccacacctgtgacaaagtttaatttataaaattagacatagtaagatattaacaacaataaataataataaaatagaacaattaaaacaatatactgtattctgagttatgtgaatttggtctctctctctctaaacatcttactgtactgcactcatgtattttcagaccatggttgatcaaggaaaactcaaactgcagaaagtggagctgcagataagggggaagaatgctgtaagaacagaagcccacctatgtgccaggtgctgtgctaagtgcttcattgcaatgaggcatttcaacgtctaagtaatcctataaattctattattgtcctcaattaaatgtgatgaagccagagacatggccatgagtaatttaaccaagatgaaaaagccactcaccactcaggtccattggacatgaaactcagctcttactaccctataaagcccagtgcttccatctgctcagggaagtacacaatcatcatcatcattaacggtgcaggggtaacatctgctcatctatgttttctgatatgcttaattccttagtccccttagaaacatctcacatatgtattagtccattttcatactcctatgaagaaatatccaagattgggtaatttataaaggaaagagttttaattgactcagttccacatggctggggaggcctcacaatcatggcagaaggcaaaggaggagcaaaggcatgtcttacatggcagcaggcaagagaaagtgtgcaggggaacttccctttataaaactatcagatctcattacacttattcactatcacgagaacagcatgggtaaacctgcccccatgattcaattacctcccactgggtccctctcacaacacgaggggattatgggagctcaattcaagatgagatttgggtggggacacagccagaccatatcacatgggattctccacatggactgacatgatttttaaaaatctgtcagcagtaaaaatgaatatcctagcagtgaagaaaaataagttgtaaatattttgaatcttattttcagacatatgtgtgtgtacatgcgtatgcatgtacgcacacacaaactcacacacacagctaatggtcttttgtgccaggtaaatgatagcaacatgtatgagatttgtttaccatgtcatttatttaattaaacaaaactaaatattgtgccacaatattttacccccaaactcagtcagctgtgacagaaactgcctgcacccaacattaagaaacaagaacgccagaaatgaggcagaggaaggtcaaacgccatttctctgggagtccttgttcaaaggctgctccagcctcacagcccagaggcagttccttgtgccctgacttaggctccttttagaaatctataggctcctgttagaaaaggaaatagtctctttctagatgtggctgtatacacaaaagttaaagaatcactaacacatgagataaagcatttcccaaagccttttagggaagagagagtattgctctttccctcctggtattcttccctttaaaaatctgaactcagtgtgaacaaataacaggtcagagactgagacagtcttgttcatagcctcacacacattaagttctatgcataacacattgaagctatatttttgcaaatatcatacttcattttctagaaacttgaaacatagtcaagaggaatttttaatgtttgtagacattacttatctctcacgtacattctgtattgaaacctatcttcatgtgacatatttacatgctacaattttgatgatagaaatttgacgctgttgctactgaaggttgtgaatgtaaggcctcgtgctggactgtcatattaaacagcgatgtgccacatggttttgagtgcagaaagtttaagtgacagtaaagaatgtacattaggaaggccattatcactgacactttgaatttcacataactggaccttaaagatgatactggctcaaggtcaaaaggcactctaaatatcaatatttatatcttttctctgatgcaatcagaaaacattttagtcaacctaccaaaattactgatttgggaaagaattaacaatttattctcatctgggaaaaaaacaactcttttaggccatgcttttgccctctgggcctaggatgccctacaccctgaaatgctgcagctagaaggcccgcaccagatgcggccctttgaccttggacttctcagcctccaaaactgtaagtcaaataaacttgggcatacactttttaaaacccactatttcaaaactattaaattcatttttcccccaacagaagctccctgcagcaaaagtcacttcctgtagaaagaccacaagaacaggccgggtgcggtagctcacgcctgtaatcccagcactttgggaggccgaagcagacagatcacaaggtcaggagatcgagaccatcccggctaacatggtgaaaccccgtctctactaagaatacaaaaaaattagccaggcatggtggcgggtgcctgtagtcccagctactcgggaggctgagggaggagaatggcatgaacccgggaggcaaagcttgcagagaatggcgtgaacccagaaggcagagcttgcagtgagccaagatcatgccactgcactccagcctgggcaacagagacagagcaagactctgtctccaaaaaaaaaaaaaaaaaaaaaagctcacaagagcaaaggaaagccttgctcaggaacaatgaaatggactcaaatacccagcatttttcagtatgagtggaaatgaccaaaaataatccaacaacactacgaaagtgtgattttcttcttctgatttttaaagttcataataaagccagaactatattcaactgtggaaacaacaaatgatgagactaaatcttgccatcctaacccacatgcactgcctagttacttcctgagcagctgcgttttggctctccatccataacaacccggagtggcagacaggacccgtgtcacagttgagtgagggacagagcaatttatgaagctacagcaaatgaaaggcagagctagacccggaacacacgtgcactgcttattgatccaaagtggatcctgtcacccatagaggcgattcgccgttcccagttgagtgtgaaaccagaaatctcagaagtgtctgaagtcactataattaccatggcaacaccactccggggggaagagcaagtgcagcctctcacctccttgtgagattatttctcatttatttgtacatgaaaatggctccatgtcaccttttttgtggccatccttgcatagaaatgaagaccatttccagtctttttattcacataattgcatttcttccctacatttcataattttaaaatatgaccacactgaacagttctaaacgtagctattgtacacttatgtagtgtcagaagcactttttctaacatgtagctttatgcccttatagctgtgggagagtataactacattgaaaacacgtgcctagcacccaaaataataaagctaatgactgtctttgtcatctgtagatatttcacactgttctttgctctctgccccttctagactcaacttttttatttttattttttaatatagagaatttttcagaatttttactcactacaacatgggtatactttgaaaacattttgtgttttaaaaattggactaaaggaaaaactttattggttttgaaaatcaaaaccagagaaatcactacattttcatactctctggagacatttcaaaaagaattagagcaaaaggtaacacacattcccaggaggtggaccctgacagcagagggcaataaatgtttgattctagaatttttgagtctcactgtttattttatatggaagccccctatgttttctcccaaagaatttcagcaagacaatttataactcttagcacactacctccacacttttaaaggtgtaaaatagagaaggtggaatgaggtggcagaatgtcttgcttctatcagatgtgtgcttgaacatgaggtgacaatacactgaatgctatcagggaggctaatgacacacagcccgcctaattgtgaaatttttattaaggtagagttgtggtgctgtggatgtaattattttttaaagtatatttgacttgctttttatatactgatcatctgtgtcagtgaaagatctcacaaaatttgatgacaaattagttgtgactaatattttaaaatgtcccacgcaattcttctgcatctctagaagattagaaacagaagaaatgtcatttaatgggaaaagtaaacatgcaggtgcatctgcagaaaagcacaaactcctcatgatcttgcaggacttacaaattagcaaatatctattttaaaatttccagaagtctttcaccattgtgagattttactttcatttcatgtcgaatctatttgaatagtaaggaggaaaaaacagctacctattatggataagtatggttttaggcatttatgatattactgtgggttatttttaagtgaaatcaacttaaacgggcaatatatttatttaagttggcttggttttagtgtcactggccaaacatttcaacaggaaattaccatgggaattatatctttaatagctatttctcctaacaatattattgtgaggatcaacaagccatgatgtttttgcctgattacacaatgataatttttttctttttattttcctgtataacggaggcatgttataattaaacataagttaaaatttcttaagctgtttgttggaaattatttatatataattcctttaacaactatgaatacccattaataaacctagattactatttgtccatttcaagcatcctatccctggaatagattagtgtgcctagttcttctcattttaacaatagtacccagacgtgcgtgggctccctggtacacacgtgtcttttgtgtgttcctaaagtttgctgtgaatgctttctatgactatggttctttccaatttaaaattttaatagaaagttaaaactctagatgtttaatcacttctttccttaccaaggctgaggaagtatttttaatttttctgagaggtaagcaattttaatcctgacattttggctattggccaataattacgaactgttaattctacggggcaggatgtaggtcctcggcaacaaaagatgttagacaaggttcttgctttcgagaatgtctcaacccacccaaactcatctaatcttcagcaggttccccacctataaacaaagtccacatccaaagactacgatttatgggtctgtccagaggcttcccgaatatttcaccgtctcaaatatattgtccggcagaattgtgaaaggtggaagtgggcagaaattgagtaagtgggcattaaatgccctatccagttcatccatccatcctatctataccttagcttgtctttgacttgactgtttacaactctgcagagatagaggttaactgatagaaaacataaagcaatgaaaacacttcctgtccatagcaaggcaaaggactcctgttctcagtgctgcaaatacattttgccccatagaaaacaaatctctgtggatagaatcttcaatggaaccagttgcaacatcttagcaattccctcattcatgaatgagttaaataaaatatttgactcaatgttcatctgctatttgtatgaaactcatgattttatcacctaaaaaagaaactcttggataatgttcatgggtggttttttttcctctggttcctgccactgcgtcatctcctgaagctgctgttctttctccagcttgcatgaggccaagcataaaatgcaactctctctccctcattccccaaagtgctgctgacataagtctgctgtggttacctgttttatacagggagatgtaggatgaggacaattgccacacagcgcaaagactgaaaaaatcctaaaatcaaatggtagatgctgtcatctataagttcttgtctatccctcctgcagagaatgttttggtgacgccaacagtcccagcctgtagcttcctgctctgtcatggaggtcacctttctttgctcctgctccttcatttccactcatctgcatgtccttgaagcttcctccagcagcttttagagacgcttccagagtctcattatgttattatacagaggaattgaagaactaggttttagttcctccgcctacatcaatttctggcctcactgacaacacaagactcactgaggtcccttgctactaagctccctgctaccccctttgcatccaccctccaaaaataaaacacagtcagccactctacatatttcaatatcacactgactttctttctttttttttttttttttttttgagacggagcctcgctgtcgcccaggctggagtgagtgcagtggcgcgatctcggctcactgcaagctccgcctcccaggttcacgccattctcctgcctcagcctcccgagtagctgggactacaggcgcccgccaccgcgcccggctaattttttgtatttttagtagagacggggtttcaccgtgttagccaggatggtctccatctcctgacctcgtgatccgcccgcctcggcctcccaaagtgctgggattacaggcgtgagccaccgcgcccggcccacactgactttctaccagacacagaaggaactaatacagaaggctaatcatcagtagtttttgaatccaccaataacaaataaataaataaaatgtatttaagtttaaataattttattttataaattacatacttaaatagaacaatttagatgttacttacatgcatatgttatttctatttgttatttaactttaaaatatcttaaacctgtatacttaaattgtgtgtcaaatgtatattttatattgtatgttattatatatttatatacacacatatatacatacacatacatacacactgacttttcacacatatacacacagtctgaaatttaccttttgactaccaacacaattattacaccattacttttattaaatgtttttaaataggagcctcatttaaatctactgcatattcttttaacttgcttgtgtctaaaagtttttaaggcagcttacaaaactacgtactataaactgagggcagcaaaaataaagcctgagatatagctaatattcaaattacacatcaaaagaccctccctgattcctagaggtcagccatagatggctaacagatcacccaactataaggagagacccctatccactcagttgctagtgaatatacagtaacacagtcaacaaagcacatgaaatgcattcaccaggacttgggataatcacccggcatggtttatcctgggcctttctttccactactctctctatgactttcaactcacagcctttatactggctggtccttcccctcttgactgtcctttttcagatgactccagactgtccatcctagccaccaaccattgtaaactcagatcctggcatggagtatttactcaccaataaatgtcaagtaaaagaggcaggcaggcaggcaggaaggaaggaaagaagaaaaagagaaagaaaagaggaaagggaaggagagaggagaggagaggaggggatggcaggggagggagggggaaggagaaggaaggaatgagaaggccctcagggggtctggggttgtagcataaaagggcccataactgtaaaaaatgatattttacagttcaggttttaaccttgaagtgcacacagaccttaatacagcactgtttaagcattaggactaaagcttgaattttcacggggtaaactgatatttgaagaacctatgcaatatttcctttctagtttctaatgttccttgaatggctcaagcttgaaaccactgggatcaacatctgtcatcaaacagagcttgaaatcagctaccatcggagttgacatttgtaggacacctgccctcaccctggcctccgctgagctcctgcttggctccctagagtacttctgctccttcctgggtgccagtcctgctggcatggggtcatcagtgcctgcctttagcaactctgcttggtctcactttctgcttctaacagtctgggagcaccaggtaagcaggtggtaacaacaacatgcagactcagagaataagaccatgaggaactccacatgtttgaagcagggtctttagcacaaaggtttgatcctttaaatttaacctttcatgggccttttatgtaattcctggttctgacttatctatgggttcatggaataatctcagggtgagaaagcactttctccctctctctataacctgtaactctctctctctctctttctctccctctctctctctctctctgtgtgtgtgcatgtgtgcgtgtgtgcgtgcgtgtgtgtgtgtgtgtgtgtgtgagagagagagagagagagagagagagagagactgcctgctcacacgtagagggtaagcactccaggtagctataaaacatttcaccagtgaagcatactgctattgtctctcaggcaggcttgggtgttgcatgaggtgaggctggagggggctgctggagccacatccttagagaggtagaagtcacaccaagtcatgtgggttcatgctgagagtaatcagagctactcaaccatttccagcagagggatacatgagaagatttgaattttagcaaaatcagcataactgcagggtggggaatccattggaagggctgagggtgaaggcaaggaagcccgtgagaaagttaataatcttagagacggaaccaggggagaggcagtgaagatgggcagcttctagaaacattctagagagaacctatgaagctgcttgagggtgagggctgtttccagggagacatccaggtttttggcatgagttttcatagatggttctgctattcactgagataaggagcacaggagagagaagagagttgtagccagcatagtgaagaggccattgccagttgattagagtcaaatttatgtacattctggttcttgtacactctagatggcacttcgcaaactaaggcacattcaaatccctggggtatcttatgaaaacacaggcactggttcaggagatccagagaggggttgatgtttctgtctttctaacagttgatgctcatcttgctggtcagggaccacattttgaattaaggctccacattaatcaaaacttttcctgttatgcacccattctcaatgaacttaccaactctatgagtgtgtcgccctctctgtactccgcacctggaacagtggctggctggagacggacacctttgttgagccccagcagcaaagcccttcctctctgagtttctgcttccgcagcaagggctgctctgctaaagtgatgccagagagcttggaagtctctgtggagatcacggcttctctccatatcggggatccaggaaaagagacgtttggtctctggaaacttctatttgaaggctcagtcatgtctgaggttgtctttctgcatcagattgcctgatagtttcaatgagaaactgctgaactctgaagtttgactctgctgcatttcagggggagaggtaagctttttattcttttctgtctccgtgggcacagagtgacacatgcacagtcaagaagaggagaaaggcatccacccaaaggaaaaaaggtaaaaatcaaatcatctcactaaagacgccactgtgacaagggttcccttgggaattacagccagaatacctctcacctgggagggatattatagctcgaacagtgaaaagaaaaagctttatttcactattgtcttttccaattattgtgccccttgaaagattaagcaaatggtttatttttccttggcttcatttccagaatcacctttactggacacaatttaaattctagttatttccccaccaaaagccaacaaaaatgagttcaagagagttcacagcgatttcaaagagaattcacagagattctgcagccacgtggaaagaatattataggagattctaccatactatgcaatcctcatgtataataggatagtcagaggtcatgggcactattctctaggtctatgcttctaaaaaaccacaacacaaaagtaatgctataaaatttgcataaagaaaagaaaattttgtgatggttaatttgatgtcaaatcagctaggccacagggggcccaggcatttagtcaagcattattctgggtgtttctgtgagggtgtgtttggatgagattgatattttagtcagtggactctgagcaaagcagactgccctccctaatgcgggtgacctcatccaatcagttaaaggcctaaatggaacaggaaactgagctccctcaagcaaaataattcttctgctgatggccttcaaactggaacatcagttccttcctgggtcccctgctgactttgaacttaaactgcaacatttgctcttctcaaggtctccaacctcttggcccaccctgcagattctggatttatcagcctccgtaatcacgttggccaattccttaaaataaatatcttctatatataaataagggccgggcgcggtggctcacgcctgtaatcccagcactttgggaggccgaggcgggcggatcacgaggtcaggagatcgagaccatcccggctaaaacggtgaaaccccgtctctactaaaaatacaaaaaaattagccgggcgtagtggcaggcgcctgtagtcccagctactcgggaggctgaggcaggagaatggcgtgaacccgggaggcggagcttgcagtgagccgagatcccgccactgcactccagcctgggcgacagggcgagactccgtctcaaaaaaaaaaaaaaaaaaaaaaaaaaataagtaccattggttctgtttctccagagaaccctaagacatcttccatcccctaaattttggaaatggaaataaaaatcaaagatatattattcagttaggatacaacgtaagattttgtaggtgtgttagtctgctcttatgctgctaataaagacatatcagagactgggtaatttataaaggcaagaggtttaactgactcactgttccacatggctagggaggccacacaatcatggcagaaggtggatgagaagcagaatcatgtcctacatggcagcaggcaagagagtgcgtgtgcaggggaactcccctttataaaaccatcagatttcctgagacttattcattatcatgagaacagcccaggaaagacccacccccatgattcaattacctcctgccgggcccctcccatgacacgtgggaattatgggagataaaatgcaaaatgagatttgggtggggacagaaccaaaccatatcagtaggtctatgtgatttgctaaggacagtgttatacacaataaatacagtatttttttaaaaaaatggaatctataattggattctagacattttaatttcttttacttactatgtaggttcacacagtatattttcattacatggatgttgaaatattactttcccactgtgtggctgatggatcacataccatcctcctctccatgcaggaatcaggtaagggtatgtgagaggaaggaggttagggttgggaagtctttgtttaacttccacctcattcttgagaaaagatttgagagaggtctggctggagtacccccaccctgacgtcacaaagaggttgtctagagccatttggcagtgcaggcaggagcttctggcacttggtaggatgaggaccaattgttaatgtgctttctttgcttagtttttatccccacattctctcccactgtcctgcaaggtttctgtctcatggacatgaaaatgtgtcagtataaacaccagcattctctattcacacaaggattccttgtcactggggatttttgctgacttctattagtgtaaaaatcattcttcaactttctctaaaattgccaaactttggcaaaataattaattaaaacagatttaaggtcactttttaaactacagatgacatggatgagctccattattcttttacgtgacttgggcacatgaggaattcaaacataaaacttcaccagcttataaaatctgtgagtctctgcccccgtgttttaagatgtttgtaaaatttcaaagtattttgtcttacgatatcataaaagaaagtgcaattttagagtctaaaattaatttaattacgaacacttcaaatgtgttctcttattcttttttaaaaataaatgctttctagtgaaaaatctatttttctctttgacaggtaataaggcaaaattctgggaggttattggtaattgctctctttttttatctcatatctcctgttcacattgtcaacaaatcctacttattctacctgcaaaatatgaccagagagtgattgcttctgcctaacctttttgccacgattctcttattgtcaagcattgctgggactctggcaattttcccttgcaggcctgcctctttctagtgttgcacgccacccccaccctccagtcacctctgtcttttctcagttcagcaactgctgcagttgctaaaacagaaattagattctctgttcaaatccatgcaaaagtaccctgtaccattcaagggtattccaagggctgcaataccccaggtaacctgtctcccatttcctctctgtcctacctaccctccttctataaacacccccacacccaattcattcaacccaggcacactggcctttgtgctgtttctgcaacatgctagtcacactcctgccctaagacctttgcctagcttctctctctgcctgaaaagctcttcctctaaatacatttcaccagcaacttcccttcctttaagcatttcctcggatgccactttctcagcaagccctgtttgaagcattttgcccccactgactattgccaacccctatgccatcactcccaaccccccttcccgggggtctcatttctttcacacatgctacacataacatttgatcatactatgtaatttacatatttattaggtttgatgtagtacccttcttcccacaacagaaatcccataaaggaaaacttttgtctgttatgttcactcaaatatctaagacacctagaataatgaccagagtataataagtaaccaataaatatctttcaaataaatcaagtgatttttccattgctttagaaaaaaaaaatcctattctagtgcttcagagcctttgataaattctactttataatgcatgtgttattaggtatagattatagataatgaggataagttccacttaaattaagaaattggcttgctttctatttgaatataggtcattggtagccagttatataaaaataagaaaaaagaactaattgagaacaggctgacttcccaccacactcccagagcagattccaagaccaaagaaataaaataaaactctaaaggaactagaaatttatgatctttctcacaaataattcaaaaaatttttaagaaacctcagaactcttcaaaaaatacagagaaacaattcactgagatcaggaaacaataaatgatcaatattagaaatttagcagtgagattgacatttttttttaaaagcaaattctggagctagaaaatacaatcgaggagcagaaaaatgcaataaaggtcatcaacagtagacctgataaggcagaagaaagaatctgtgaacttaaagaagaaattatataattagaacagaaaaaaagaaagaatgagaaaatttgaagaaagtatacatggaattatatgaccaattcaagaaagcaaatctttgcattacaggagtttgaggcaaagaagaggaagactaagaggtagaacacttacttaaaaaactaatagtataaaactttccaaatctagggaaaggtataaatatacaggtacagaaaagtcaaaattttcaatcagattcaatgcaagcaagactacaccaagacatgctataatcaaactatcaaaaatcaaagacaaagagaggagcctgaaaacagcaagagaaaataagtgaatcaaaaataaaggggttccaataaagctagcagcagattcctcagaagaaaccttacaaaccaggaggaggtgggatgatacatgcagaatgctgaaagaaaaaactgccaattcaacaaacctgtccttcagaaaaggacataactttaattgtatacaaaatctctatacttttactcttgccaacacttatatttttaatgtcaaaattttacatttttaaatattagcttattattaggagaaataaaggaagaataaaaattgtcccaggaaaacataaagctgaagtagttcatcaccagcagaccccttttacaagaaacactaaagggagctctacaggctgaaagaacattaataaacaacacgaaaatatatgaaagttaaaactcagtctaagtaagtaaatggtcaaattaagtatactctaatactgtaatggtagtatgtaaattgcttatatctttagtatgaaggttcaaagacaaaaccattaaaaataatattagctacaacaatttgttaagaaatatgcaatattaaaagatccaaattgtgacatcaaaaatagaaaactggctgggcatggtggctcacacctgtaatcccagcactttaggaggccgaggcaggtggatcccctgaggtcaggagttcgagaccagcctggctaacatggtgaaaccctgtttctactaaaaatacaaaaaattagctgggcatggtggcacgtgcctgtaatcccagctactcgggaagctgaggcaggagaatcacttgaacccgagaggcaaaggttgcagtgagtcaagatcgtgccattgcactccagcttgggcaacaagagcaaaactccatctcaaaaaaaaaaaaaaaaatatatacatatatatacatatatatataaactgttgggcgaagtgaaagtgtagcctttgtatgcaattaaagttatgtcattagtagcttaaaatagcctgttataaatataagccacctatgtaatcctcatggtaatcataaagcaaaaacctatagtagacacacaaagataaaaagtaaaggatcaaagcacaccactaaacaaaatcacctaatcacaaaggaagacagcaagagaggaagaaagaaacaaaggatctacaaaacaaccagaaagccagtaacaaagtgacactaataagtccttacctatttacaattaccttgaatgtaaatggattaaattttacaacaaaaagacaaagagtggataagtggatttaaaaagaacacaacatgacccaactatgtgctgcttgtaagacagtcacttcagatttaaggacatgcatagactgaaaggccataagtcttaacaaatctagggagattgaaatcacatcaggtatcttttccaaccacaatggtatgaaactagaaatcaataacaggagaaattttggaagattcacacatacatggaaattaaacatgttcctgaatgatcaatgggtcaaagaagaaattaataggtcattttttacgtctaaattttaagtactaaaatatcattgagactaatgaaaacagagacagtgtgccaaaacttataggatgtagcaaaagtagttctaataaagaagtttttaacaaaaaaacttttaaattaaaaaaaaaagatgatttcaaataacctaaagttacacttcaaggaacaagaaaaaggagaacaaactaagcccataattggtagaagggaggaaataataaaggtcagtacaaacacaaataaaatagaactagaaaaacaatagaaaagatcaacaaaactaaagttgggtttttttttttcaaaaatagaaccaacaaatcgttagctagactaagaaaaaaagaagacaaaatcagaaataaaaggagaaacattacacctgatacaacagaaatacgaaggattataaaaagctaatatgaacagttatacaccaacaaactggataacataaaaaaacagataaatatctagacacatacaacttaccaagactgaatcatgaatataacaatctgaatagatcagagatgagtaacaagattgagtcaatagtaaaaagactctaatcaaggaaaaatccaggacctgatggcttcattgataaattctatgaaatattgaagaactaatcctaatcttccccaaattattttaaaaagtctaagaggtgaagcttgcaactcatttaacaaggtcagcattaccctgataccaaagccagacaagaacactctaagaaaattgcaggcccgtatcctagcaaaccaaattcaacagcgcactacaaaggctattcaccttgatcagtacgattggtccctagaatggaagaatggttcaatacatgcaaatcaatacatgggatgcaccacattaccacaatgaaggggaaaaccacgtgcatctcaatagatgcagaaaaggcttttgagaaaattcaaaattatttcatgataaaattctcaacaaattaggtatagaaagaatgttgctcaatacaataaagggcatatgtgacaaacccaaagctaacattgtacacaatgatgaaaaattgaaagttttcctctaatatcaggaagaaaataactatgcccactcttgtcctttctgttctacttctctggaagtcctaactggagaaattaggaaaaagaaaggaattaaaaacatccaaattggaaaaaaaagaagttaaattgtcactgtttgcaggctacatatcttttatgtagaaaattctaaatactccaccataaaactattagaactaatagataaatacaaaaaaattacagaatacaaaatcaacacataaaaagtagtagaatatttatactctaacaatgaactatccaaaaaagttatcaagaaaatagtctcattttttacagctgccaaaaaatagtaaaatatctaggaataagtttaaccaaggaagtgaaaaatctgtacactaaaaactacgacattgttaaaagaaatttaagaaaatacaaattgaaaaatattctatgtttatggattggaataattaatgttgttaagatgtccatattacccaaagtgatctacaaattcaatgcactccctatcaaaatggcatttttcaaagaaatagaaaaaaattagcataaaatgtatatgaaaccccataagacccccaaatagccaaagcaatcttgagcaaaagaacaagttggaagcatcacactacttgcctccaaaatatatacaaagctacagtaaccaaaacagatggtactggcatagaaacagacacacagaccagttgcacagaatacagaataaagagcccagaaacaaatccacacatttacagtcaatagattttcaacaaaggtgccaggaacacacattgaggaaagaacaatcttaaataaatggttctgggaaaacaatatccacatgcagaagaatgaaattagacccttatctcacaccatatacaaaaatcaactcaaaatggattaaacacttaaacataagacttgaagtaaatacaggggaaaggctccataatattgatcttggcaatgaatttagtatgtgaccctaaaagcacaggcaacaaacgtagacaactaggattatatcaacttaaaaagcttctgcacagcaatgaagacaatcagcaaagagaacctatggaataagagaatatattttcaagccatatgtctgataagggattaatatctaaaagatataaggaatgcaaacagctcaatagcaaagaaacaaatagcctaattaaaaaatggccaaagaacctgaatagacatttctcaaaataggacattcaaaaggccaatcgatacatgaaaaaatgctcaacatcattaatcatcagcaaaatggaaattaaaaccacaatgagatgtcacctcacacttatcagatggctgttatcaaaaagacaaaagataataagtattggtgaggatgtgtatcaaagagaaccctagtactctattggtggaaatttacactggtacagccatttttggaaacagtatagaggttcttcaaaaaatcaaaaatagaactaccatattatccagtaattccactgttggatctatatccaaaggctgtgaattaaatcagcgtatcgaagagatatctccacctccatgttcattgcagcattattcacaatagacaaaaattagaatcaacctaagtgtcaacagaagaataaagaaaatttacacaagtaaataatattcagctttataaaaaaggaaattctgtcatttgaaacatggctaagcttgaaggacattatgttaagtaaaataagccagacacaaatgacaaacactgcttgatctcatatgtgaaatctaaaagaattaaattcatagaagtagtgagtagaatggtggtttccaggggtgggggcaggggtggggagttggggagatgttggtcaaagacgacaaaatttcagtcagacagaaagaataagttcaagaaatctatcctacaacacggtgactgcaattaataacaacatattgtattcctgaaaagcccttagagtaaatttgaagtgttctgagcataaaaataagtatattcagtaatgcataggttaattagctcaatttagccattccccaatgtatacatataagaaaacatcctgttgtacacaataaatatatatacatttatttgtcaatatacaaataaattgtttaaaaaataaagttaattgggattgcttttcataaagatcagcttgcatacatttgcctttgcagagttttgcatcactaaatggaagctgatttctaacttgtatttccagctatgagaactgctatgttggaattggtcaaaataacgtggattttgaaaccactaaaattatgaaatatgaagtactggatttcgagtataatccaacagactcatcaaagtctagcacatggtaggttgcatagtaaagtgttaagagtatggattttggcattagatctgggtttcaaaatctgcacatgtcataacctttctgtgtctcggttttcctcatttataaaacgggaataataactctgtgtcattgggctgcttaaatgtttggcacagtgcctccttcacaatgagagttcaggacatatctcattttgttgccaggaggaattactattgtcaattgtatatgaaggcaacaatgacccaccattacgagctgagtaaccttaaagagctcactgtatttcagtgagcctcagtttgattatctaaaaatgggaatacgccacacctgctctgcaagactgctgtgaggactaaacaaagcaatgcgtataaaaaaccacacagtggctggcccatgggcttccctttctgctgtagatgggtgttttagagacaacttccctaggattggaagaaaggtggtagaaactgacttctgtataaaccagcaagattataaaaacagctgcctggcattgttcaggatttataagcacatgtatttcacatatacctatgtaaacatgaatatatatacagtatgtgtatatatatataatatgtatatatgcactatgtatatatatatatatagtgtgtgtgtatatatatacccatatatatatatatatatatatatatatagatatatatatatgggtgtatatatatatgggtgtgtgtatatatatatatatatatatgggtgtatatatatatatgggtgtgtatatatatatatatatatatatatatatatatatatacccatcactgacagatatatgagagaaaaaatatggtacatattataagagagtaataaaacattcttacaattctcaaatagaattttagaatccacagaatttctcaatgctaagaagggagattaatttaaacacaagagaatttctcattatagcaatgtaatacgcagctcattctttatcatgtaagagagctggagctataaataatgccttgtagtatgagtaataattcctgaaaaaaattaactggaatgaagcaggtttttaatacagtattcaatgaaatcatctaaatttacctaagctagaaacagactactttgaaataagtgtatgaatacttgcagactataaaagattgaaaagattactactattttatctgtttatgtggtcatataccacaatagagtaaaacaccatatgtcaaatatctagacagctattgaggaatctagctcaacaatacaagtgatcctagccacaagattaaacagttctgacacaaatagtccatctcttcacaggtttctctcttgctctttgaatacctcaatcagacattcagattaaagcaaacaaaaaaaccaaaactctactacatataggatgatagcagccagaaccttccaatctgtgccagcctctagatgaaagatctctgttcttatttaagaaggcactcaccagcaacgcatgtgtctcatttactatgtgggacaaactatgatccaacgtgcccattaagtttctggggaaagtttaagaaataattagggaatttaactttacttttctcttgctcttttccaaaccatatctaagacagttgggttaaagaagcagaaatgcaattaaatttagcaaatattttttgaaaacttctcagatgcatagaaggaagtcatccaagtgtctgtgctggaggtgaagatctgagcacccttctttttttctttttctttttcttttggagacagtgtctcactctgtcacccaggatggagtgtagtgatgcgatctcggctcactgcaatctttgcctcctgggttcaagtgattctcttgcctcagcctcctgagtagctgggactacagacacccaccaccacacctggctaatttttgtatttttagtagagacagggtttcaccatgttggctaggatggtctcgatctcctgacctcacgatccacctgcctcggtctcccaaagtgctgagattacaggcgtcaggcgtgagccactgcgcccggctgagtacccttctttaggaagaaaacttcagcagtactgggagggaggaggagaaaagggagattgcaggaaaaaagtctcaggacaacacatgatttgcttctttttgcctttttcctaaatatttatgaaatagtttctaaatattttgttttttaagttttctgaagaaagccctttaaatacatatatttcataaatacaggatttatgtcttgttttatgagtaacatagacattctagtaataaactgcttatttctgtagtctatgtctttatgtctttcaactgattaagactcctgcttctattaatttttccagaaaccttccaggaataaatatctgttttaaaagagagattaagtgaccagcaagacctcactattgaatgtcaacttaactattttctttccaaatcttacttttctttttctaattcacagcttcatggatgcagacggtactcttgaccttggagatctacatcatattcttcagcatattaaagctccagaagggaagagatggcaccttcaagctcaatcattaataaaggggcaatttacaaagccagtgcagtacccaggggctaagagcagctcaaaactgtcatcttccctaggcatggagggttagtgggcaggagtggtttcagagcaacctgaatgggaaggagcaggtgaaacaaaatcaactctctaacgatactgctcttctgccctatagtctcctgctgatgcctcccattgtggaacctggtaggaagcccatgacctgggagcccattgaggcagccagcctcctggggctcagagcagggtgaagacagggaaagagtgggcttggagaggcaatatggtaggtatgcagcacgaggcttctctttttaaagagagcaagctcaaagagaatttcattgcagagatactccaaacaatatctattactgcaaatattacttcatacagcctaaaggtagaattagtagtctcttctcagcagggttaccatatttagctaatacaggacaccatttcaatctaaatgttagttacataatgcataatttttaggataagtatgctccacacaatatttggaatatactcacactaaatattatgttttgtttatcaggaattcaaattgaactgggcatcctctattttatgtgacaacctcacctctttgtatattaaaatatatattcttcaaatacatatttgaagtattgttattacttctgtcccaaacactagaggaaatgatgcgtttctacccaggtgtgttatatttagtattattcctgtgagctttatatttgtgctccccttttcaatctgtgtcttgagtcctccatttttaaaaattatgctccctacttttattcattgtgatatataaagactgtctccacagagaatgtactgatttcactgaggtcatccatgagctgcctcttttctcatgagaataaatttttaaaggcattaagcttcgtattcttttattttttgttttgagatggagttttgctcttgttgcccaggctgaagtgcaatggcacgatctctgctcacagcaacctccgcctcccgggttcaagcgattctcctgtctcagcctccagagtagctgagattacaggcatgcaccaccatgcccagctaatttttgtatttttagtagagacagggtttcaccatgttggtcaggctggtccggaactcccgacctcaggtgatccacccccaccttggcctcccaaagtgctgggattataggcgtgagccacagcgccggctaatggattattaatgttctttccggctgcagtgattttctaattttgcttttgaattgtatatatcttgaagaacttagaaggtttctcattctttcatatatctaaaccagggactcttaatctggggcctgcataccctctatgcataaaattcaggaagctccctgaagctgggtataggaaaacatttgttctatttttcactaacctctaactgaaatttatcatgttttaaaattattaatataggcaacaaaccacagtagtattagtactgtgacttcatcatcaataaaaattactaatattttcaaaatcacatttcagatatagctctctatacatttttattgacactaataacttcttaaaatttgctatggacacaaatctagtgtgtcatttaataaattaatcaagaagaacatatcatacatcatggattttatctaatttgataactgtattagtttactattgctgctgtaacaaatcgccacaaacttgatgacataaaagaataccaaggtattatctatagttctgtaggccataaatccaaaatgggtcaagctgggctaaaagcaaggggttggcaggccgtcttctttctacaggctcaaggggagaatctattttcttattttttccaatgtctagaggctgcccaaacccctcggttcatggtctccttccatcttcaaagccagcaatggcccatcgagtttcccattgcatcactctgacacgggttctcccgtctcttccttctacttttaaggactcttgtcatgacattggactcacccagataatccacaataattttcttatgtcaaggacagctgagtagcaaacttaattctatctccacctttaatttccccttgccataggacataacatattcacaggtctggcaactaagccacaggcatttttggggagtcataattctgcctaacatatatattagtaataatttgctaaatgatttcctttataatattatgtataattttttttatttaacaaaactatcctgaggagagttccatgggctccatgagtttgccagagagctctacggcacacagcaggttaagaacgtctcatttgcgacagtgatgctgacaattagaaccatagcattcctttaaggaaatatctgctacaaagtcacttgcatatgttctctttacttcctacttcccaacgttacgcattaagaatatctattatgctacttttacagaagaagaaaccagggtttggagagtgatctgccaaaggccacactgctgatgggttgcagggctaaattcaaagagcgctccaccgaccttggagctgaggctcccatgcttcaagtcttcttcgagcattgccctgtattcactcaccgcctgatatgcttcgaccaagaggatattagtaccagatgagtatcagcctacactgtttattccccctcttatggatgcatctgaccagactagaaatgttatctttgaaaaacaaactctagctacctctgtccccagctttcctgcattatcagagaaaactttattaacatgcacttataacaagactagcacatgtttctcccaccaactgttgtagctagaatgagcaagtgagcaggtggcagtgctatcaaggagctgtcagatgccaacttcacgctgcacatccgctgattttcagtgggttaccttacctcaggtagctacaagaactctcaaacaaaaatacactgaagatctggaacacaaatctttaagtcattaacattcgtctctttaatttcagggcttacccagggtcctattttctctggatttctcaagccacaaagattaagatctagctctgattttcatgtatttgtttgatttggttttggttttagttttggctggatagtatcttcactgtgcaacttggaaccgtatttgacctggtaattcaggtctgaattggcactgatttacagccactgtgaattgatggtcatgggttatcattgtagttggtcatttctgctagttcactgactagtggaacctctcttccaggctttcatcagaaagatgctattggatatttcaaaagagcaccagagctccccaacagtggctcataaacgtttctggtagaacaaatccatgggacacaatatctcaccgtgactcactgttctatctggccagctctagaaatgaacagtctgaggcttagaacattgaaggaaaggaaagagaagagaagaggaaagaagaggggaggagaaaagaagagaaaagaggaagaaaagagtggggcgaggagagaggaggaagaggatttgtttatcactcaataacaccaagtctgtaccagggatgttggccgactcctcagccaggagggcatcaagaatcaggtcccagcaatggtgatggccacggggcacacagctgtccctgccttccctgttctccatgccttctctaagtctgagtacttcctcctgcctcagccctccctcgggagaacagtccacctgtcactgagaacagaattctcgatgtggaatactgtggttagcgggcattacattaaaatatacaggatacaacaagctttaacctgtcagcatggcatgacactcgttttagaaagcaaaataaaaaaagaagaacaacagaaaaactacataggcgatgcgaaaggctcaaataatgcgtgacacaagatgttaacagctgtttaagacccgagctgtgcaacttctggggccgctatccatcctgtgttccaatggaacctggactcccccttgaatggttcaatacagaggacctgattatggatctctgggggtgaaactgcaagtgcattttatttattttctcagtaactatttgcagttttaagactatccagtggaaacatgcattactttattatcagaaaaaaatctttttatttgtatttattcccttatttgtatagtatacagataagatatagtaagagttgactgtcataccagctctcatgtctgcctctgaggctggaaatcaagggctgtttatatggttctctggtgctatgttactcagaagattcaaaggaagactgaggccaccaccaggtggaaggtaagagcctatcaatgacttggttttgtggtactgtgtcccacctcctggttgcccatttttcacaggtaattggaaataatgggaaagccttaagacaactttgagaatgagttagaaaaatcagtggaagtggatttagcctatcatcactcacacagtacagagactcaaaccgtgacaggcagctgggttcaaaaactgccagagattcagcacagtttgaaaatgacaatttttttgttgttgcagttttacaaaggaaaacaggatagagttatttccatgtagttgagtattgttacatgctaaaagatttcttccagttatttttagccagtttatttgctgtttgataagaataggaaagtttagtgaaagtcttatgattcacagcattctgagaaaaaaaaaaagtctggtaaattctaagaagaagtctactagtcagagctttctcagtccctttacaacagctggtggcttgcttaaactgtcttatggaatttcagacatatctctaaaaggtaaatactataatgaatgtcctacacttgataaacatttggagtgccttaattttcccacctgtttacagggactcttactaagagaacaggctgttgctaaggtacagggtggctgtcagaaacttctagcttcaaatatgccaattaaattactctttggggaagctcggctcatcacgtaaaatcactcgaggagttactctatgattgtgatatgcagtgcttctcatttaaaatcccactacactccccatatccagtccctctgtgtgtggtgataacaacattcttgacttttaacacttcgccaacaactctattaatcaaagtgtgtgtctacaggagacaagcaaagtagctgtatctgactcattttcattcaagaaaatgttcaaaatgatgcaaagaaccacacacacacaaaacaagatataaagtcactgctgcaaagtgaaccacggatatgatactcttaaactgacttgtgcttttttccagattcttaaagatttactgaaggaacttttttactaacgcacttcatgcttgcatttcaaaaatgtgtaacgcattttataagctactctgttaatctcaaagatgaatgagcatcggctaggcttagctatcaactgatctgaagcccatgcacgaggggacagtaatgacactcatcccacctgattttgagataagcaataaagagtgaatattctagcaaataaaatcttcaatttgaaaggttagatgccatttctcagaatgtgctactgcctgggacgtccatgatgaacatgaaaaataccagtgggagccccggactcactgacttcacggaggaaaagtaaaacaagccaaggttgtttttaccacttatttgctccttcttgcttcattggaaaaatcaagtggctcaaacaaaatcggcttaattcagatataaagtgcttaaatggtatttgataaccagtgaccccagattcaggagagttagcagccctttcacatttccaacaccacactgtcgagtttgtatatatggccaaagaaaatgtggatctgtgatgaggactatgtgtcaagattatttaaagcaaagagcgagtaacagtcgttaggctgcagtaagagaattcaggaatcactaggtatatccaggaagaagcgtttttaaaactgttacattggaaacatcagattggtggttataaagggaaaaagatatattttatcttattgtgttaccaaaatatcaactttaaatataatacaaaaaatattggtctagtggtaatcaaaagaggaaaaaaatattttgccctactattactaaaacataaatcacaaatacaaagcatattatcagagaagttacactttgattggaaaaaaactttctatgttaaaataacagccacaacttggccaggcccagcggctcacgcctgtaatcccagcactgtgggaggccgaggcaggcagatcgcaaggtgaggagttagagaccagcctgaccaacatggtgaaaacccatctctactaaaaatacaaaaattagccaggcatggtggcacacacctgtaatcccagctactcgggaagctgaggcaggagaattgcttaaaccctggaggcagaggttgcagtgagccgagatcacgtcactgtactccagcctgggtggcagagctagaatacatctcaaaaataataataataaaaataaatttaaaaaaacagccgcaactattcaacaccagtagcagatttcagaaaatagtcctatgcatcattaaagcatatagctcttctatttgtcttacgggtaaaaaatacggcatttacaactttacatacacactgctgtatttctatagcaggcaaatcacgtactctaatgtccatcttacatttgtgaatataacttgcatctacagctggatgtggtgactcacacctgtaatctctgcactttaggaggctgaggtgggcggatcactcgagctcaggagtttgagaccagcctggggaacatggtgaaacccctctctacaaaaaacacaaaagttagctgggcacggtgttgtgcacctgtagtcccagctactcgggaggctgaggcaggaggatctcttgagcctggaaggtggaggttgcagtgatcatgccactgcactacagcctgggtgacagagcacagcaagactctgtctcaaaaaaataaatgtataaataaaaataacttacattcacaggagactgttggagctgccctctggacagcctatcacagagcagctttctctgtaccccctcgcccctccactcctgcatacagacccttttcctgaactgctctcctagagcaccaatccctggacctttgtaaccaaaacccaccggtatttgctaaatgtacctgtggaaaaatgggtacagttgagtcacttttattttcctaagtggagccaccctacatggagagagtatgtttaatctggttgtagagaaggggatggagtatggacgcagtgtgggtcccagcagattccattctaggaatttcaacactgatttatttaatttctgactcacactgtcaggcagggaagaaaccatgaactgtgagtatttaccattctgagtcacttctatttgcgaaagcaaatcaccattgcttttgtaacttttagaaaagaaataaatcaataatgaaattactaaaatggaatatgctgacagccacactgcacccacactttaaatgggaatcaatatgctatttataaatcaaaaagagaagggaaaagatctcaaaagtctgtttttggattattagaataactctattatgtatttcaaatgcaaattgtaatggtaaaaagatcccaagcataggttaattgaaatcaaattaaaaatgttaactaaacagtttggcatttaaatatggagacaaacaacattttaaaattagtattgctgttgttgttatcatcattattattatttaaagatagagtcttgccctgtcgaccagactggaatgcagcggtgcagtcatcgctctcagtagcctcaaactcctgggctcaagggaaccacctacctcagcctcttgagtcactcagaccacaggtgcaaaccaccacacccggcaaatatatatatatatatatatatatatatatatatatatatatatatatatttttttttttttttttttttttttttacttttttatagagacaaggtctctttatgttgcccaggctggtctcaaacttctggcctcaagtaatcctcctgcctagcctcccaaagtgctgggattacaggcatgagccattgtgtccagccagaaaaacaacattttgacaaaaggaatgatggcaaaatgctacatttctaaggtaaaattttggttattaaaaattttaaatttggtaaaatggcctgaacatggatgagctccctaatacctaaaacacaaagttattgttgtttcctctttgtacaaaattgcaacttgtgcagttggtttttttctctaaaattctgcatatttttggaagttgatgtcagtccgtgagtgtcacttgttacacaagcaagggaagaactttcatcaggccctcagtttccaagagcacagtcatttgcagccataaattccaagaaaataaaacaaagtagaattcaaaaggagttcaggcagtgaatcctaatgcccaagatgtcaaacctctctaatctttcctactcgtatattgattagcaaagggtctttttccaagacccttttcttttacactggagaaataacggctagatccttgccaagtggccaaaggagatttgattttctatttttcactgggaggaggtgaggggatgacagctccccattgttcctctcactcagagcctggggcctgagcctggttttccaaaaggcctgtacagtactttcaccccactggcaaatgccaatatgcagtgggttcagaatgatgaggaaaaccagacacagacatggacccagtcaataagcagcatttcacacacagtgaccactagctagtaaaatttctatgaaagaactcatatgtaatcacattaaaaaacaggaacgaggcccaagcacaatgccatcctactctgtgaagttataaaaattttatacatgcattctgaaaccaaacaaaactagaacagaaagcaaactttattacacatgctttgatctttctctaaaagaatctaggctgggtgaggtggctcatggctataatcccagcattttgggaggccgaggcaggcggatcacgagttcaagagatggagatcatcctggctaacacagtgaaaccccgtctctactaaatatacaaaaaattagccaggcgtggtggcacacaactgtagtcccagctactcaggaggctgaggcaggagaatcacttgaacccaggaggcacaggtttgcagtcagctgagatcgccccactgcactccagcctggtgacagagcgagactccatctcataaaaaaagaatctaaaattgtccccccccaaagcactctaaaataaataacaaagaaagcactataaaatcactaatgagtatagccaggtccaatatagaaataaacactatataggctaggcttctaaaaaaaagactatgaaattgaagggaaaatttattaattcaacagagatagcatttttatgaggaattttctagtggcattttagatatgactggttgttacattgtaataagtccaccttttaggaattaatatacatcaatttttaaataataagttgctcaaaatgttagtattgttgaccaaaattaagactgttgaggtttgataatggtttgataaacatttgttcgaaatcaaacgtgacgattgacaaaggtttattgaaaactaaatgtgaagattgactcaggaagtcaacagaagttgggtgtgttccagagtcagctaggagttggaaggcctctataagaaagtttagaaggaagagaactcctcacaccagagctgtcctttttcattggagggtacattacagaagttacaatcattggctacagatggcaacatacaggttaaagtgtccatgtgcaagaccatcagccagactttcttcccattctgaaacaaatcaggatccttttcagtgtctgtaagttacatagtaaacagtatgccaacaattggagaactcctgataagaccctacccagggaccgcatgttgccatgaatcacaagacttctgccagatgggttaatttggaagcctgccagatctgacccataggttatcagtattgtgcttatttacgtattagaataaaagcaagaaatttatgtttgagaaaatcatgtcatgtttcttttatagtttaaaaattctacaaaattcctgacctttaaaaaatgtatcagacttgtttttgcactgttcacatatgtgttaataataaaggttggatttatttgggagaataataaaattatattcatttgtttaattctcttcatggtatgttgctttatagttcataaaatgctttcacattttctcagttacttttgagaaaagaggaaagcagaacagatatgatactatccttattttatagataaagaaataggaattttgccacagccctcaagttaacagggctgataaaaagtgacattaaaaatatattcacatatagataaaattttaaatacaagaaattcagcttaatgtaagttattacattaatttcttgattagagtatccatgtcacagctcttattgaaaacaaatgtcataaatttagcatatgttacttaataacaaaaatattcaaaatgaatgtgattgtggttaactttatcatttctccaaagaaaaggtttccttgactacaaacatggaaaagatgaaactagaatcactaatgttgttttcagttctaatattcatgagtctacaaattttataattctttatagagtaaagttacaaccctgcacttccagtaaaacactctctttgcacctctgcctatacataagtcactctttcaccaacctacaaaaagtattctcggccgggcgcggtggctcacgcctgtaatcccagcactttgggaggccgaggcgggtggatcatgaggtcaggagatcgagaccattctggctaacccagtgaaaccccgtctctattaaaaatacaaaaaattagccgggcgtggtggcaggcgcctgtagtcccagctactagggaggctgaggcaggagaatggcgcgaatccgggagctggagcttgcagtgagccgagatcgcgccactgcactccagcctgggcgacagagtgagactctgtctcaaaaaaaaaaaaaaaaaaaagtattctatttgaggtcttgcttttgggggaaacacttgcatgcaaaaagctttctccaatgagaaaggcaagggagataggttacactgttttgcaagaagagagtgtgtgtgtttgcaggaggaaattaacgtagcagtgatctttcccttccaattatgcatgattcagcgattacacataagaagaaattcccttgcccatcttatcctgagtgaaccttgttctttcttacaaaactgagtctattttctttcatatctgttattccacaaacactgacttcacacctactctgggaagtcaccccactgcacactggggatacaacagcaaggacagaggtaggtttactctcctactaaatcttatctctattacttcacgtcattggaaattatgggtatcttgtgatgttctggactctaaaatgtcagagacatgtgaatgaaggagcgaaacgtggtgatcctcaaagcctgtaggagaagtgggagaggagagagtgggaggctgtcttcacgtttgcggcattgttctgtctccatctattgccaagggccagtagaggtcagaatattcttagcagattattgacttctgattatttgattaatcaatgatagaaactgttgtccatttgtcgatttgtaccgttgctcagtgaagttatcatagtaaagttatagtactgtatagttatgcgccataagagtaacagtgctctgacctccctcgttcacacctgggcaaggcctcccccgagacccattaacggcacaactgcgtccctagtggccattcccagaactgcaggggagggaagggaccatagaaaattctcagcttcgacgcttgcccatttcctccactaatttttatttttatttatttatttattttttgagacagagtttcactcttgttgcccaggctggagtgcaatggtgcaatctctgctcaccgcaacctccgcctcccgtattcaagcgattctcctacctcagcctcccgtgtagctggtattacaggcacgtgccaccacgccctgctaatttgttgtatttttagtagagacggtgtttctccatgttggtcaggctggtcttgaactcccgacctcgggtaatccgcccgccttggcctcccaaagtgctgggattcttacatcgactgcatagaaagaggagagaacataacctacctaccccgtacatacttcagcccaggtcctgtgcctcatctgtaatatgaatgaagagacatggagaacagaaaagaaaaaaagaaaggaaaatctatcttgggaacaacaacaacaaaatctaagaacacaactatgcatatatgtcttagtctgtttggtgctgctgtaagggaatacatgaggctggataatttacaaagaaaagattgatttggcttatggttctgtaggttgtacaagaagcatggcaccaacatctgcttctggtgagtgcctcagggagcttcaaatcatggtggaaggtgaaaagggagcaggtgggtcacccaaccagagaaggagcaagagtgatggcaggaagtgtcaggctctcttaaatagccagctcttgcataaactagtagaaaaagaactcgctcattatcacagggacggcaccaagctatacatgaggaatctttccccatgacccaaacaccttccactatgccccaccttcaacattaggggccaaatttcaatatgagatttgtagggacaaatatccaaactatgtcaacatggtgttgaatgaatggacagaataaaagcaaaataacatattagagagagaatttaaaaataaaaaaactgtatgtaacaacaacaacaacaacaaaaacaagtgaagtcaaaaatagtcaaaataccctccaggcaccagatcacagattgggacagaaaacagaaaggcacttcattaattttcaaggctttgcactcaaaactgctacataagcaatgcagtgacagattgcatacagaattcataaggaacctccaaggccatttgtgtgatcaggacagacaacctgggcatgaacttgaaggcacacatttttcgtcaaaaatgtgccaaaatgaaagcaacctcccaaaacaatttaagagaaacagtggcaagtgcaaagaaaactggacaggtatggtgaaccctactccttattcccaaagaagtataggaaagctgttgcagagccctgcatgctcaatttacaattcctggatcaacgtttttccaccctgttttcactgagccagggagccatccaatgcttcatcatcccagggaaaatgaacaaggccatcttattaattggactacatcaccctttttcctcttaaaacagggctcactgttagaaactcacactggattagcgagaaaatgctccaggcttcaacttagcacatcagaaagtcagagcttaactcctaatttaaaataaaccctgtatttttggttgttttcctttttgacattgcataaaatggattatgcaataaatagcagacagactattcacgttgcaccagtgcatattctaatgttctgcagcaacatctaatggtgtaaataagatgaaaaaactaacgatcctttatgaaagattttttttctttatggggcataatagcatgcacaaatggaccctgcagaacaatttgctttcattccttattttcgctcttatactagtaaatgtgggataaatgtataatgtctgttaaacattcataattattaaaccatcaacggagcttatcaaatcccacatattcctctccaatgagctctttaaagggaacaactttgatttagagtataaagatgtggaatgggtcagctgatcattctggccccaaactgcggcaagggtgttgtcttggaaggaaaaggaaaagctaaactaatgcagcctatagcttgtgacgaaaggacatttttcaaattttcagaagcgaagttaagaaaagattacttagaaactggcactgcttaaaaatattggtacatcagtaaaggctacttcttatttcagaatattagtagggtaattcctactataatctgaaaactaaagaagtatacatttacaagtgttgacgttccagattttcaaaaagactgcgaattcatttaagaaaaaataaaaataacttttgcacactgctccttttccttgaaaaagagtttttgcctaaagctatagactacattaacttattgttttgaaaaaaatatataaacgaaggaacagttatacgaatagtacagtaactgtagcataccttccacttccactcaccacttgataacaagttgcctcattttctccactgctttccctttctctcattctaatgaaaacacttattgttactgctgaacaattggagagtaaactgcatacatgatgtctctttctccccaaaggtttcaacattatcttctgagaacaaggacagtcttttatacaaccacggaacggtgatcaatttcagaaaaaaattaaaatttaactgtgatggtctttgattttaagaacttagaggagtgttgtaaaactccaattgaaggtaaaaatactcttaaaaattgcagtcttttctgactcctcactcaaaacaaagtaaaagcctcatgagggcaaagattcaactttattcccgggtgcacaagccctcccaggagagcttcacactcagcgcactcgtaggcaatgttaactgatttcaaaaattattcttcaaacaatatttaattattatgaagtatctcatgtgtctagtataatacatgaaatcattcttgactatgtttaacgtcaagaaggttgttatgacccacattcttgggaacatgatatactttttaaaggactctacaaaactttctttttttttcatagataaccctcaaagattcacctaactcttgactaattttgaaatatgttctgcatgtgtgccactaatttggattttaacatccagtggtagcgtctaatgataaggtagttcacatttcagactgattaaaggatcatttaataattttattcttttatctcccccaccatacacacacacacacacaaatctttcaaaagaaaaccaagcactctctccaaactgacctctattaaaattaatttttttaataactgcttggttttatcactacttccccaaatgctaattaattctaactctaaactatgtaattataatacttctgctgaaatacaaattatctggtgcccctggggtgaacaagtaagaatgtatttcatgttccattcaacagaggaaatgcgatgtttctcagaccatggaaacaatgtagcagcctccctggctcccctcccccaaaacactggcagttcctgtttcttcctctttagcaggaagacaggaacagagttgacagttggcatccagtcagtttaatgcctctctccatggggctgtgaggaacggtggcatgcccagttatttttggccaggcacggcaacacacagagccttgaggagccttcatttaggcagtggcggccaatgtacctgcagaatgtgaattgacgttgccatggaaatagaacaactcttcccggttctgtcaaaatgcatctctatctgcgactaggcagaggtcaggaaggagagaaacacaagtgccagggagaacattcgagaagggaaggactctgcagtgccccagtgtgggagaaatttgatgggctttttctgataacattcatatacactattgtgtttcaaatctggatcttgtttattcattagacagtagcaaatccggatacacacacatgcgcacacacacaccatatatatatatatatatacacacacacacatataccttatatatttatatatacatattcaccttactctctgtaaatatacatatattatatatatacatatatatacaccatatatataccttacatactaacatatgtatatatatatataccttatatactctgtgtatatatatacatatgttacatatatatgcactcacatatatacccccacacataccttatgtgtatatatatataccttatatatttacatataaatacaaatgtacctattcacctcatatacgctctctctgcatatacatatatatgcacacatatatatgcatccacacacacaccttatgtgtgtatatatataccttatatatttatatttgtgtatttatatatttatatataaatgcaaatgtacatattcaccttatatactctctctgtatatacatatatatatacacacacacatatacccacatacacacatctatacacacacacaagcaacacacacacacacacacacacacacacacacagacacgcatattttcttctgggacccaaagccagcctttgcagcctaccatataacattgttagggtctcatttttctcagttttcacacaaggttgactcaggtaatctctaagccctccttttctaatatgtctatgatgccatttaacattctgttttcagtcttaatgtgcatttagcccattctacctggaacttcaacaaaaccatgaaaacaggacagtgcatgtcataagaacacataaataggagctgtgtaaaaaaccaaagtgcttcctctctgatcccctctttggaatgtagttctggggtgctgctgtgggcactgagacctgcagctgtccctaggcttaactcttgaggtggcaggaggaaagtgacagtgctgtgtccctggcagactctcattactggaaatttgttgctgctgcctgttcctgagttcagcctgggtccagcccagtgctctcatttttcatcacctgtttggccctgcacatggctctgagtatgagctttagcccaaatgccaacctctgggtcccatgcttttctggcctctgcagactcttggttcacagagacatgggtgcttcatgcagagggtgggcacaccttgggtccagggacacaggggaccaaggagggcacatagaacctccatgatgggtattagtgaacctcgatactgagtattcctaaacacagagtgaatagccgatattccaattcaataggaatctgtgtgtgcattccaatggacccttgagttctgaccatttgcaagagaccctgaaggcctgagatgcgtcctgtcttgctgggtgaggcacaagcccagtcatctgctgacatgtggcagccagtctgtcaaagagcctcgcagaccatctgcacatattttcaatgcagtttgcccatatatatatataatatatatataatatattatatatattatgtaatatatattatatatattatatatattatataaattatatatattatatattatatataatatatataatatatattttatatatatattatatattatatatataatatatataatatatattttatatatatatatgtacacacacatatacacacacacatatatacatacacacacatatacacacacacatatatacatacacacacatatatatacatacacacacatatatacatgtatatatgtgtatatatatgtgtatgtgtgtgtatgtatatatatgtatatatatatacacacacaccacctaaaaccttaaaattttacttcattgagttataggaagaacatccatccatcatgatacaactgtgcatggcttaacagtgggatatgttctgataagtatgtcattaggcaatttcattatcatgcaaacaccacagagtgtgcttaatgcaaacctagatggcataacctactacacacctaggctttactgtgtagcctattgctcctaagctactaacccatacagcatgttactgcataaatattgtaggtaattggaacataatgttaagtacttcatttctaaatataccaagcataaaagtggtacaataaaatgcggtattataatcttatgggactactgtcatacatgtagtccgatgttgactgaaatgtcactatgtggtacataactgtatttatgaatctggtaattcaagaaaatgtccagatagccctttattttactcttcctaggcatgtgtaaatatatgacggtgagtgttatgtgtgagcttggctaggctgtaataatacccagttatttcatcaaacacgaatctgggtattgctgtgaaggtgttttgtagatatggttaacatctacaatccagtcaattgagaaccttatgaaaaaaagtctcagtgctatggtctgaattattgtatctgcccaaaatttgtgttgaaattcttacccacaaggtaatggtattaggaggtggggatttgagagccctcatgaacggtattgtgcactcttaaaagacacctgagagagaccccttgcccctttggccatctgaggataaagcaagaaggcgctgtctatgaaccagggagtgggtcctcaacagatactggatgtgctggtgccttattcttggatttttcagcctccagtagtgtgaggaagaaatttctattgtttacaagccacccagtttatggtatttttgctgtgacagcccaaatagactaagacacccagaggagaaattgtgactcaagaccataacataaaaatagaaatcattcttgagcttccagcctcttgctttgccctacagattacagacatgccagctcgacaattgtgtgggccaatttctttaagtctctgtctctctcactctctctctctctctgtgtgtgtgtatgcgtgtgtgtgtgtgtccatacacatataaaataccctgttgattattggttctaggtaacttgaatcactagggtagtttaaatcaaatcataaaacacatgaccttccttcttataacattctagactctaaaatttgttgcccctgactcttaatataagcacatatttatattatttcagatcttgcatctattagaaggcatttaacaactctaaatgaatatgtttccttaatgacataattcatttgccctaaattatatgtgaagtagattagcttgcaatagtggaataaattgctcctagaataaattctaggagccataaaactacaaacttccagttgaattttggtggtatacttacttgctctcattctagaggcacacaggtcagtagttataccttactttaaataccatctttcttcaagagaaaataattctctgcaataattatagcaagtcagttaagaggagcaggattcaatgcaatgctattatcttccagaaaatatgcttttcatgaaagtatttcaaaatcaaagattgctgtcaacaatttaaatgcattaaatatttttatattttatagattcttgaggaggaaataaaacacaaacactaacgtgagaatggatgaaaagttatgtagtgtgtggccgggcacggtggctcacacctgtaatcccagcactttgggaggccgaggcgggcagatcacgagatcaggagttcgagaccagcctggccaacatggtgaaaccccatctctattaaaaataaaaaaattagccgggcatggtggtgtgtgcctgtagtcccagctactcaggaggctgaggcaggagaatcgcttgaacctggaaggtggaggttgcagtgagccgagattgtgccactgcactccagcctgggtgacagaacaagactctctctctctaaaaataaataaataaatagaaaatatatgtagtgtgatgtagtgtgtatataaggaattgcaaatcattgtatttgagttagcacatgagaattgagcttaaatggcctttgcttgtttgcttaaaaatatcacatgtaccctgtaagtatgtacaaatattatgtattgctaaaaatttaaaaatactttcatagattctaataaaataaaatttcaaacaacttaaaagcactctttctgtgttttacaataattcaagaatccctactgtatgtagaacagtgtttctcaaccggggtcatttttgaccttctgatgacatttggtaatgcctggagacattctttgttgtcacaactgggagtgagagggtgggtggtactgacatctagtgggtggaggccagggataatgctaaacatcttaaaatacacaggacatttcctttggatgtacactcaggagtgaaagtactggatcatatggtaggtccacttttagttttttgagaaaccgctatacttttttccgtaatggctttactaatttttattcccacccacagtgtgtaagggtttcctttctccacatcctcagcaacccttgttatcttattatgtcttttggataatagccattctaactgaagtgaggtgatacctcattgtggtttggatttgcatttatctgatgattagtgatgctgagaatgttttcatatacctgttgtccatttgtatatcttctttttaattttttttgctgtctttttgctgttgacctgtttgagttccttatgtattctgaatattaacccctcaaataccacgttttcactcatatgtgaaatctaaagtcaatcttataaaaatagtgaatagaatggggtaaggagtaggaatagggagatggggagtggagggtcaatgggtacaaagttaacgatgagaaaggagaagtgctggcgttctgttgcacagtctggcaactacagtcaacaacaaggtacgcacatctcaaaatagctgtcatagaggattttgtatgttccccagaaagaaatgataaatgtctgaggtgatggatatgctaattatcctgatttgatcattaaacaacgtatacacgtttcaaaacattacgttgtgccccataaataggtacaataattgtgtgtcaattaaactttttaaaaaatatatttaaaaatgcataggacagttcgccactccctccccgagaaaaagaattattttgcccaaaatgtcaatgggttgaggttgagaaactctgctatagaacaaagctaggcataaggtatgtgtttcccattggcatgtgccgtattaaggagtgagatagaaatctttattaaagtaaggccaatataagcagttagtagacagaaacccagtacaaactcagagtaaatggtgttgttctccttaggagaagagctaagcaaacaaagcccatttcagctcagttaccatgtgctgacacaaatccacaacaagggataatagcaaagcaattcgttccacttgattatagttcattttgctcaacaggaaagtcagatttgatgttcatgatcatcaggcataaatcctacaaaatgtatttaataagaatgcaatgtatttttaactgccttcattaatttgattgtcccccctttaaaacaataaataatgactaaatctaggtcacgttttctctttgggccttggctcctcagtttcaaaagtggagagttctactctgtgagtcctttagttcatgaatccttgctgatgcaggatacatatttttttccttgaaagggaaacagaattgatcagctgataggtgtgatcgtcatgagcaaaacaaacttcgctttaagaagttatcaaatctctgtatctaaagagaattttcgtcaagagttttcgagattcagatgccaaatcttcctgtttccattcgcaactccatcaactctatcttgccaccttgctgcccagagttgaaagcagcctggtactcagggcagggaaggcagaagcacatgtaattgtcacatgcggtaggaatcaataatcgacaacataatgacattcaatgaacaatttacactgaaggtaaataaattgttgatttcatgtttcgcttacacatagtgcaaagagctcttcaccacggctctggtgatgaaggctttgtatttattaattttgttgaccttggagaaataactttactcctctattggagtttcctattgagtaatgctggcagacacctagacacttcataattttaaaaaatgcatactttctaattaatgaaggaatagtgatacagaagcgggcagggaagtgttgggtagaggaggttgtggtccctgactagggctctactcccaggcctgtgcccacggacctaggtgaaggcagacatttctgtttttgtgcccaaatattgcaattcccaagaccaccctggcctgccatgcccccatcctgtgcctataaaaaccccgagactctagcgggcacgcacacaagcagctggatgttgagaggaacacatcagtggaaaaagacacaagtggctggacttcgggaggaatgcaccggcctaagagcacaccgacagaagccagcaggccagcaggccattgaccggtgaatgccgcagagtttcggggaggcagagggaggagagccctggtggctgagcggcccaactccaggggaaaaccaccttaccactccatctcccttctggctcccccatctgctgagagcttcttccactcaacaaaaccttgcactcattctccaagcccaggtgtgatctgattcttctggtacagcaaagcaagaaatcctgggatacagaaaagccctctgtctttgtgataaggcaggagtctaattgatctgatacgcacaagccacctgcacatgctaaaccaatagagcacacagtaacacacaaacacacacacacacacacactggggcctcaggagctgtaaacattcacctctagacgctgccatggggtcggagtcaccacagcctgcctgtctgtatgccctctcctgaaagtttgagcagtgaggcaccgaaaacacgagccacacccccatcacacaccctgagagggggacaaagggacttttcccatttcaacagtatcttaagaacttgagtgaatgtgtgagcttgatttgatgaaagaaattcggcttataacaaaaaatgccagtagctaccatttaaacaatcttagtggcagttgggtccttaagaaaatttatttatttatttattttaaacaaccagatctcatgagagctaagaaaatttagatcatgagcaacttaaagttagaattttcatgaacaaatttttcaaaattttaatctgtcattttccaatctaatagcacataaaaatctaaaatttggaaaattaacagattttccgaaacctttatttttcgttaatgagagaacaccacaggataattctcttttttttccttttctatgtttttatttttaaacttgtcctttttctttgcttgataaagtaatttaaaatattagatattccttaaaaggttgaatagaaaaagttatattacataaaatcttaagtgcttatatacatatataaacactttacatagagttaagatttttcagcgctttctgtgttatcatgtattaacaatcaatacaaactcttggtacacatgtctgctaaacatagaatctggacaagtcaactaattcattctttttttgcttgagttttctggtcaagaatgactttataatagactcagggaaaactttttttaaaaagtagagaaagacaaattctttttgggaaatgcagtattaaaaaattcacagggccaggtgtggtggctcatagctgtaatcccagcattttgggaggacgaggtgggcggatcatgaggtcaggagttcaagacaagcctgaccaacatggtgaaaccctgtctctactaaaaaatacaaaaattagccaggcgtggtggcatgcacctataatcccagctactcaggagactgaggcaggagaattgcttgaacccgggaggtggaggttgcagtgagccaaggtcatgccactgcattccagcctgggcaacagagtgagactcagtctcaaaaaaaaaaaaaaaaaaaaaatccattcacagaagactgtgaaattcaaatacattattttcaattcccatgacatttacaccagtgatatgctagaaagatttcagaaaggctcatcataactttataaataaatctgttcatactacttgtgtttttacatactgttgagtcccaaaagtggattttatttgtgacgtatttaattcatggcaagtatatacatataatacagcattacataaatatacttggaaacaacaaaaactaaacttgaaaatgatgccattcctccagtttttggagaatgaggcatgtcttcctcttttctgtctagcagtggacagtggtatagtcagaaccaggttaaaacagatgtggtcagggaccaaaagagtgtgtgtgagggccctgtaagcagctacaccacgggggttcatcatacaaagtgggtctttgtgttacagatctccaatgtcatgaaacaaacattctttaagtgagaagaacaattatacattgctgataaacacttccgtgaatgtatcaaatgatttgctaagatattaaaactagtaacttttcagagtaatttggtttccatcaagaagccttctgtgcaaggaggaaatagccactctcaatgtcttggatccaagaaactacttatttgtcaccattttctcttttctcctgttaaagaacaaggactttaaaattagacagactcagctcccagctatatggtctcagaaaattcacttaatgttttgaggtaccctcatttcagtctcagccaagagggctcctactgaaaacccctgtggccttccatctgagaaccttctcttggccagcaaacaagacagagcatgaacagacctcagccatagataaggtgggctcctggtatctcagacatgatcatttgaagtgtactgtaccaaatctctcgggggccccaggtgggactgaaccccagtttcccacaccaataaactgctggacaacaccctctctactgacttcttttctttcccatgtccgttccccaatttcctaggatactttctgggcctgcctctgaaagaagttccttacactcaaattcttgtctaggatcttgcttctcggggagcccagcgtcagaggctcccatcaacctcccagctggagctggcccccagaggcagagctataactctgcctccagctgggtggttcacacctaaaccctctgagcactttgcagaacttagtttttttcagggcaagtacttagcagagaggagaaggtgggaatattgttcatgccttgtttgtgacttaccacaaggccaagcctttcagggacatgtcactccctcaaatgaaacccacttttatttggcttattcagggagaagggggtgaaggctactcagagggctccatccaagccttaactgacacaggtgctgcaatgagaatatgaaactggatgccttccccttttcaggtgtgtagaagacaaggacatctgccaaaagaggatggggtgagagatggcatggtaggtgaggccggggggtgggattcagggagataatgagagccctcgaggtaacttcgggctggccaggaactttgcttatcagatttttgcagcagtttgaagagaaccattagggcacttcaacagaggcctgaatacattagttagcttgattgtggcactcagttcacagtatatacatatatcaaaacattgtgttatataatttaaatacagagcacttttatttgtcaaaatcaattagttaattaagaaaaaaaaaacagagctctggatttgatcctgagtcactttctcagtggtacaaaatatgctggcaggggagctatttctaagaatgatgctcagagctttggagccaggaggtcaaggtgcttccctggcctgtgttcctgagcccctgcaaagttagcagcatttgcactgcctggtgtggcttaaagtccctgccctgctgttccatccctctgatctttccaagcaggtggctctggcctctgtgtctctttagggcatttgctctgttaagctccatttttctctgaccttcctattcctgatagtgtccctatatggacatacaggtgaagctctcacttcctaaatgcttccagccacactgccttcagacaaaatctaccccatgtatggtagatgccaaaaatagccataatcctccatgtctccaagtatcatagcctttacaatgatcttcacaactcctcctatcaagtcccatagtcttcttctccactctagccacatggggcatctttgtatttcacattggcccacagaatgtgaaagaagttgctgtgtaccagcactgagtctaagcttctgcacactctctctctgaaacctactgagctaccatgtgaggtagtctagggttgcctgctggacaacaggaaacaatgatccagttctccttatcttcctaacacatagctggcaaccaaccccaggagaagagccacctctctgacaggcagctgctcataaactcatgactgaacctagctgacagcagaagaaccacccaactgagctcagcctaaattgccagttcacacaatcatgaactagacaaatagccattgttctaagccactaagttttgaagtagtttgttatacagtaataaataacagatacaccctggaataaatccagtataattatattgcagtgcctgtttctgctgtcattgctactggtgcaaaggaaacatgaagctcacccttgcctctggaggaagaaccgtgggtgaaatcctgagacagaaaccctgtatgcggctctccttttatctgaagaccacccgcctcatagctgtggaaacaggagcggatgctctaatcatgccactagtcatctccaggagttctgccatgtaaggtaacctggtctggctgccatccatcatctctgtgtctcaaaatatcacagctcctttttaaacctcaaagccaaaaagcaaacctttcaacactggggtggttcagtgcccaaaaccatagtatttctaccatgttctgatgatgacttcataaatcatcattgatttaatttcacaaagctctccatgacataagcacagccatagccacagtcctgacccatatttaatggtgaaattcaagaatctactatgtgttgggattctcctctttcctcctctgtgtggctcaaataaggcataagagacacaaagcgagattcatcatattaacttaaggaataaagtggcttcctctgagaacttggcctccagttctcataatatactatattatactccattatagtaattactggcctgttattttgttatacattattatacatagagtgtgtagaaatgttttataaatagaataatgcatagccattgccctgaattttctagaacagcactaatttaaaatattccttccagtaaatactggatattgctcttccttgagccaagaatttcttctacttcaatcgtcatgtctgtgacatttgctagcaccatagtctcatactgttggtaaattttgtacaagtgcatcttgtctttctaactaactggtctattccttaaggtcacaagccttgagggatggctttatacgtccctactcctccactgccaggtactccatctgtcctttgtttttgctcagttggcctcagtaactcacctgctaagtcattgtctctgctttcagaatcctagaggataaaagacagagcagcagccagcgaggtgagcagcagtcagagcctcctcatggacaggatgaaagacacattttgtctttggcaatgtccaggctttccactttttttttttttttttttttttgagatggagtctcactctgtcgcccaggctggagtgcagtggtgcaatctcggctcactgcaacctctgcctcctgggttcaatcaattctcctgcctcagcctcctgagtagctgggactacaggcgcgtgccaccacccccggctaatttttttgtatttttagtagagatgggatttcactgtattagccaggatggtctcgatctcctgacctcgtgatccgccctcctcagcctcccaaaattacagacataagccactgcttctggcctaggctttccatttttagcccctcctcttcctcaaagcattccatggcactcccctctgggaagtttctccagtaaggcagtgatcactgtgctctccagtgctaagaggcgctggcatgcatctgccattggttttacatgttactattacaaaacagggtgctgtttcttagtggccgttaaatagttttacctttgcacaggaatcatatttgcactattagcttgtgtttattaggagcaaccttaactgcaaagtcttggatccttacaatgtgtttcaaaagcacatggacctccttcatagttggtatggagcagatcaaaggtctgcatcccatcctcagagactcacagtcccttctgcttgtcaaaggatattgcaccatcatgtccctcatatcagcacctgcctggaccataatatgattggatgagaaatgttcaaggtaaatttttaagtatttttagctctttccatataagaatgttccagacgtgactttgagtttggaagaatgtacataaccaccttcagaacctccttttctttttagatgaaatctcttttattataaaatatcagagaattagcataactcttggctatctatccctcgggtatccctctttctttcctttctgcaagaaaagcaaaactaagaacctttatttacttagaaagtcagttacaggaggcaataaagtttatgggaacaggcttgtcgttgcttatttcccattgaccccagcaatactttggagaaacaatttctatgtcacagatatattgctttaactctaagggtgctgtttatttcaagagatgccttaacatgatgaaataataagaactgaacaccttatacaattgccctgggctcacatctcagttgctctctgctgtagctccacactgcccccagaagtgacttgtccaaaccaagtgcaccattccatggtcattgtacgacagacacaaactcagtacaaagaaacaccattgactcctcctgatttggttttctttttagaataattttcttacccaggaactgaaactccatttattgtttaagtcacatacagatttgataagctctcttttctcaatttgacttttgttgataaacaaaactacaggttaaaaaaagtttttaaatattcacaaaaaataattttcagcccttcagttgactggttgtctacaagttgtcttttgggagctctgataacaggtggtgtcttgaactgagtttacactgaaagtaaatgctctatcccattctgtgtcatgataagacaattctgagcaattgcatatccaccctatagaaagactcaagtgcttggctaatttaaaatgacaaataacctaaaataagttctatttgacattaaaatgctctaagaaaatattttttctcatctatagagacagttttcctctcacttggaaatcccaggacacttcagaatccacctatggaataccaaaccaccctttctccaccctaaacccacatttcctcaggcccctcctagagccacagtttccaccacccaccccatcgctcgataagggagtcacaacatcctccctgttttcttcactctgtccacatccgtggtgtccatcaaagctacatgcctctttgccataacatctctcagccctgcctgtccatccatccatccatccatccatccatccatccattcaaccatccatccatccatccatccatccatccatccatccatccaaccatccattcaggcttccctagactcccctcgactgaactatgtacaaggagtgccctgcttctggtgttggtcagcctcgttcccacgactattttccacacctcaggcagaataagagtttacactgaaaacgtgattgtctctctccagctacaatctccttcttggcgtctcgtcaacaccagcagagccaaaaccaccaaggcttgcaggacatggtggtttacagttcctgctggcacctgcagcttgccttttgcctggaatctgcctccctctccccaaggctgctgccggtctcaggcgcattatgcaccctctgggatcaggttccctctgctgggtacaccgttccagccaccacacctgtctcattcttcattcacccctgtctccgtttacctgtcctttcttatagccacatgcccaagctcctgcacggtccttctccagcacccagcacaccccagggtcccacagtagccttgggtgtgtttcccctctgcactgcagactgatgggcagggaccacgtcagtatttccaccactgggcccagctcccggctcagagaggcagctgctcagtgagcttgctcagggcaagggtgaaggaagaacagagcagattccaacaggaaattccaacccagagctctcagctcagccttaaggaaggaggagagatgggcaaaaaggtttggtccccattcctgagtggttgcatcacaggtgggtggcatgcagcacattccctgccatcaaaacacaaatcttgtcatggaaaatgcaggtcttgcccccattcctttccttcttttgcagcagaaattcaattaaactgataaatcagcaaccagtgatatttggcaggttctgcatccagcatcccactcaatgctctgcacagctgtctattgtgggtgtcactttgaagatgaggtgctgggcttggggaggacacacagtgggtccagcgacatgtgggtggcctcaagtaggcagagctggggtctgaccacctcccagattccaaagcctcatcatttaaggagctgcaatctgttcaaagtaaatattttcaaaagactcaagagttcttactttttgctttgatacactcttcttttatgctctcacggctgcttaaaaggtcatacaaattaaatggctttaaatcaatgttatgatttaatactttatataaaagagggtgcttaaaatactttatacaaagaaattcctttaaaattcaaaccactggggaaaacaaaaaaagaacaatgaatctgaaatactaataaatatcagataagacagttgctgacgtcaagttaaaaaaataaataaaagatccatctttttcctccttgcagattgatttccctgaactattttgtgacagaatcacttcaagtctaggtgtctgagatgcctcactgaatgagcagacaacatgaatgttctagacacatggaaggcaagcaaaaaacaacacataaataagcaagcatggggtatgtgcagcggtaatgaaagctatagggaaacataaaggaaaggtggtcagaaatgtctcatgcaggtcatgatttatatgtagtgttcagacagttcttgccgagggctttagctcagtggtccggaacaagaaagcaagcagggaaagaagatcatgggtgatgggggcatgctgctgatataagatggccaagggcatcctgatgaggggacataagtacagagactcaaaggaaagagcaagagagcctggggtaacctgggggagagagagcatggggtgacctggagaagagagaacttggggttagagaaacctgcaaatggaatggccctgggtaggactttggcgggggtggtgcttcaaaacagccacaaggctctgtgtgtgtgtgtgtgtgtgtgtgtgtgtgtgtgtgtgtgtgcacacgcacgcgcatgtgcgcatatgtgcttttgggcatttcacagggccccagggaccaccgtgacagcctcagtgagggatggcacagtcatccgaagcctggacagacgtgggttaaaataaagtcacttaattgaattaactttacaagttcaatggaaaaatgtttcacttgcagttagtcagcaaaagcagggaatctgagtgaaaagggattctgtaggtcctaagattgtttcaggatactgtaaagagaataaacgctacctcattgtcttggcttaaaaataatcaaaactatccttacctcctgccaatgtgtgtgatgaatccaggcatgtgtgaatgcatgtaagaataatttccttttcattgctctatatatgtacaaaatattttgcatattccaggatatatgtgaaaattgtttctttctctgatttcctaattcaagatctgatgcacaaaaccaacatataagcattgttaaaggaaatgaatccacctatctatttccccatccaaacatctatccatccatccacccatcgtccatccatccgtccgtccatccatccatccatccatccaaccagccatccatccatccatctgtccatccatccatccattcatccatccattcatccatccatccatccatccatccaaccatccatccacctgtctgtccatccatccatccatccatccaaccctccatccatctgtccatccatccatccatccattcatccatctgtccatccatccatccatccattcatccatccatccatccacccacccacccacccatctatccatccatccacccatccatccatccatccatccttccatctaaccctctgtttttctatctcttccttcctccatctaggtttgaaaatgaagcttcaaaacctatttaggtgattggaacatgtcatcactctcaatattctagcttcttcaagtggtttccctgaaaggaaatccatttgattttcttttaaataaatcttctgttactaatacctgatgtgctgcaagtatgatctcattttaaaatggccacatattttaaaatttacttgataaatctgcatctactttattcctatggaataacagaattttataaaatagaaggtaaaagctaaataccaccattctgcattaaaagtcaaaatttaaacaggcagccatatgttttttattcattgaaattaggatattcccaggttagagtatgtgaaatttttttatgaaaattgactttcataactagaatagaaaatttgaccccaggtggcaaaatcaattcagattccttttgacattttctaaccttggaatttctctaggagtaaagtagttgcataaagattatattcttggatattaattatttcaagtagtttccacagggaaaaaagtaaatgtcatttgtgacagttcagaagcaagtcaaggttttacttcctcttgtatgtaagaaagggaaaaataggaaattcgactagaaaatgtgcacatctccagggtagctgaagggagtcttcctgcacaaagggtagacttggggtgatccatgtgtgtaccccgccttgatgtggacctggagactccacaggcatgtccccagaactcttgcttcactctgcaggatgatgacatttatcaccaagtgttcatttttatgaacatatttcttgagctctgccttgaaaaacattctttacatttgaagagcaggtatcttgcttgctatccagggcaatgatatagagtgatatatttttaaaaagtaatctattatgttactcaataattttatgtaaggtaattaccccaaaataatcttctatattacttattttaatttaatctattatcaattatcctctgatttagaaataaagtacagaatgacatcaaatcatgggcggttgtaatgatttctcccaatattacctctgtaatctctaaacttacgtggtatcatctagtagtgaataagaaaaatagggggttccagcttggggcaagaggatggacttttctgatagacatacctgggtctgacttggttccccaagaggtggtcacagttaagactgtaacctttgataccaagtcactaggttttcatgctggctggccacctgctccctatctgatctgcatatttacttacattccctgtgtctaagtatcctcattcttaaaatggatacaatgacactctctatcttaaaggtgtaggggagaattaaataagataatacatatttaaagtcttagaacagtgcttcatgtgaataagcactaaaaacaaaatgttcattttctccttattataacatataataacttgagcaaataatttccctagacttatatcctcaaccataatgtcagacaaaaatgcaaacagagttagggtgtggtttaaatgtgatggcgtgtgttcagatcctggcaaatgcctgccacattgtatctcaataagccttagtttccttaactttcattcagcctttaccaatcaggatgtaagagtcacagtgtttgtcgaagttaaaaaataaattatcagcatcattcctactgtagagactcaactaactgtagatatgcaagcacatttttcaaaaatatattcatctcatttcttaatgtacattattagttgagtatcagatatgtagcaagcactgtgctacgtgcagaggagacaggatggataagagccaatccttgcccttgagaagctcaaagtcaggtgggaatgacaggcagataaatacataacatgctaaaggttggtggttgtgagactgtagagagacgcggcacctcagatacacctaaatggagcaaggtgaccaactggttcaaagatagtgagagatgtctaggtccaaccacacctgaaagtatttaaagcaggactttgtctccttgcaaggtcaacatggatcatgatttgggagaaaaaaacacctacttggttgagaagtatttataggcaagaagctggaggtaagtgctgtggccaattctcaaggcaaataaagaagcccctacaaggacacccactgcagtgcagtgttgagcctgagacgttactttacatcacatctctgaatggtgaacctcatgcctttaataaacgtaagtgtccaacattcagccagcaaatgtgcgaaaaacaatgaaagtgggcatcagcatgttcgattttatggttggagaagaagcggaaactgatttcctgtgatgccgactgggacactgttaagggttgagttgtgaccccctaaattcctatgttgaagtcctaaccccaagaacctcagaatatgaccttatatttagaggtcaggtcattacagaggtgatgtgaaaccatctaagattcaaaggttttccaatactctaccaatggattttgaaaaccaaagctgaccggtagagtctttttttttttttttttttgagacggagtctcgctgtgtcccccaggctggagtgcagtggcgccatctcggctcactgcaagctccgcctcccgggttcacgccattctcctgcctcagcctccctagtagctgggactacaggcgcccaccaccacgcctggctaatttttatttttttatttttagtagagacagggtttcaccatgttagccaggatggtctcgatctcctgacctcgtgatccgcccgccttggcctcccaaagtgcagggattacaggcgtgagccactgcacccggtcccggtagattctaatctaattcagggtgaagatttggtcttattaatttttgtaaggacataatataacggctgacacagaaatacagttttgggatgcgtaaagaggacacagaaaattttggcaatgatttctgaacttgatttaaagctctcgaattttaaaaacaagtccagccgtgacagctttgaaggccagaggcatggtgcctccttgtgcatccccagaacaggactgcctcacttaggaaatgccccttaataaatgctcctagaactgcaaaacacctaacttattccaaactttccggatgaaaaggcagaggattttctactcccatttcaggtctcagactccagctcatgacttgagaaacatctttttctctccctggctttccagaacattctcatgggccacagagatacccatgaaagtcccttagcattgagcactttgattaatttattgtttaacaacttatcaaaccctcttttcactgaacaaagttcctggaggcctactgaaatatcatatcactcagtataatttattcaatatgtggtgaggaagggaggtaggtcgagagagagacagacagacagcaggctgatttatgacatagatcggtgctgccttctcctcttgcaaacatgtccacaaatggacagcactcttgagtaactaaactctgagaaaactaacattgtttatttgtgacatctaatgcctcaagaagaaattactgggagagaatgctaccttttataggaattatattccccacccccaccaaaaaactcacatgcttaagtactaatccctagtacctctgtccttatttggaaatagggttgtcacagatgtaattaaacaaaacaaaattatagtagagtaggacgggtccttaatcctatatgcctggtgtctttataaataggagaaatttggacacagacagacacacagagagaatgccctgagatgatgaaggcagagatgaaatcaccaaacaccaaagactcccagaagctgggagagacctggaattgactctctctcagcctcagagggaaccagccctgctgactccttgatctcagaattgcagcctccagagctgtaagacaatacatttctgtcactggctgtacttccttacagcagccccaacaaaccaacgcttcccaagcacctttcgcattatatgaagtagtcctcctccttccatgtggttttggagggccctgaagtgggacccaggtggaattcatctctggatctcagagagagcgctcaataaatgctaagtggtaggtgagtgagtgagcagtggagcaagagaatgagtaaagggatggatgtagtgtttgtctgacacagaggcagagcaggggccactcagttgggtaaaggtctgcttgacagccaaataatttggggatagcctctctcccatcggtcactcactcctgagagcccttctgccctctccactcagaggtcacgtgtttgatcaagagatggggtgttagtgctccttcatttccagttgaaagagatgacagcatctgtatgaatccaaagctaaccccgtgcacagcagcacgccaagcacagcaggaagctaagcaggcccatcacgctgtcctgtaggacccggagctgttggcttcaaccaaaatgcgccactcccccaagtactttcctctaacaatcacaaagctgtgaaatgtccaagttttaaattattattgggaaatatttcatcttttgaaaacaattctggtttccccattttgacaccaagcagaatttggcccaaaactaaaagcgagcaacttttaagtatgaaatcaaaatttgccttgatattgtgctttctgtgtttgccatacaatgaattctggagcaatggtattattttactttattttaattttctgttgtgttttgtttttctttcctcccagtgtggtccttgaaccgcctgctaataaagtcatcaaggccgtggtgttcaaatcagatcttaaggcctctcaggtagaattgcttgatgagactggggaacatggagcacaagggaggggaaggaggagagaagaaagacaatgatacatttctgctctaatttattattcggggtctcagacacaatgaagggcaatacctagttctctgggttccgtctttccttcatgaggtcaagtagtagaggatgaaacagcacaaaggaaaatcaactcgtaaaatgaagagaaaaacgtgtcctttagaggatgaaaagaaacccagacagagactttcatagaacaaaacttgggactaggatggaacctcgctgaccacagcccagtgattacttaagggagtcccatgttttacagacaagctttaggggtctccatgggacaagcttgtggttggggaggccgagagggcccagaccccagatgtccacaccgggtccaccagagcatcgctgagatttgttagaaaaattgggatttccatggctgggcgcggtggctcacgctggtaatcccagcactttgggaggctgaggcgggcggatcacgaggtcaggagattgagaccatggtgcaacgccgtcgtctctactaaaaatacaaaaaattagccgggcatggtggcaggcgcctgtagtcccagctactcggagaggctgaggcaggagaatggcgtgaacccgggaggcagagcttgcagtgaccccagattgtgtcactgcactccagcctgggcgacagagcgagactccatctcaaaaaaaagaaaaagaaaaaaaaaagaaaaattgggatttccagtgaaattttatttgagaaaaggagtttatttcttaaaaacaagtgtgaaagcctgtttgcaaacagaatcagtgaaatgaaatacagctaaaatcacttataatcagggacagatcaagagcaaggatgttttttgttgttggtcctgtgtatctctgtttcttataagatgagaagggatattatgatgttattaattgaaaaaaagacaattcctgagatttttgaaaagggaaaatatggaccagataccttcattaagatgaaagcatagtctctatatgcagataagacccagggcattcctggtgtgtctcgttttacctaatggctttattaacataaaatcattttcccatgtactcacaaatattttcacgtttctattttttcctagatgctatggaaaaatatggccaaaaaacctgtccttacttgcatagtactataatgttagtgtcgatagcctttagcagtttgtttctattgagttgcattatgcatttggggtgctttattttcacgtatgatccatctccaatatctttattagaattaatgagctcttaacacacaatgactaattatcaactgtcatgcttctgggccgttcctcctacatttgatgcccgctcacctccccttcgcacacacaacccaaaagcagaaagcaaaaaaacactctattcattaatccattcactaaacattaattaaggtccgtctagattctgaaggcaaaagttcagatcaaacaacaattcctctaagaagcctccattgatttcccagatagaaccaattcctctctcccctccgctcccacaggactcagagattctattttcacacacagcgtaatctctctgtcgatgttaattacccacatctacgtccctccatgcccctcctcacactgcgctgtgaatctctggaggatgagaagcaggttttatttgcttcctgtgttctaatgtcactaaatatggccttaattcttccacattgtaggaagcttagtgaaggaggcaacaaacaaaacttcctaggatataagagctttaaaaatataaatcagaaaaagatcggtaataaacaaacatgaacaaaagagagggggtgctgcttaggctactgggtcccgcatctcctttgctttctgccaaaatgccctaaaagagctcccccatccctcccagcctttctgtgcaaccctgatccctcttcgatcaacttcaatccgtttttaatgccattactccaccaacaaatattgagccaaccaactaacaactgagagaaaatattttattaaaaggaatcccatatatattacttttaaaggttttttgtttggggtattttttttttaaagatggggtttcgctgtgtggcccaggcatgtctcaaagttaatgagctcaagtgattaccctgctttcatccttctgagtagctgggactacaggtgcatattacaaaactaaatgttataaataaaacaataaaagtgttagaagaaaatccagttgcatatcaatataatcttgatacaggggaagtctttttatacatcaaaatactaatgaatgtcattttacaggccattgttatttttatttttgttcatttgttttctgcatattagataacataaaaattttcaataaaaaagcattcacattactataactagtccagaactttctgcaattgcctctatttcaatacttattttatgccagcctttagtaacagactatatttaaatgcttctctgaaacaagacctatgtggaaagtaagtttacaaataaaataaagtgcgtgctagtaagcatcagataatacatatttgaaacacacgagaataaacagcaaagcttaaatttaagtattttaagagaagaatcctaaacataatgctcttcataaatagttgtctgtaccatttattctggtttagtttacttcataaattgaaagttatttccttattaaaagaatagaggcctttctcagagtcaagaattttaaaatgtttaatatatcacatatatgtgtatatttgtgtgtgtgtgtggtctatacacacacataaatgcatataagtgcgtaagtatatataagacctaaggtcaacattttacaagttgtgatgtcattacatgtattaaaatgaactttaataaagtaataatattatacttaaggaagaatgatttttcagtatattgatgtttaggaagacttggaagaaatccaaccaaattcagcaaaatgtattgcactgaaagtagtagaagacaagtatttggaataaatttaaatttctatttgttttggacctggtagatgtggcaacgcctctaaaacaaaaggcattattttgggataacttgcagtcctgatgatcaaaaagaatgtcacttgcatagatcagtggctgaaagcaaagaaagaaccaagcaaaatacacaaaagagcatggagaaaaagaaataggaactcaaagttttaacaaaagaaacttgttttctgaaaacacatggcatttttgatccacttcttcattgagactatctgcctacatgttctctaactgactgatttcagaagaagattattcaaaatatatagaatgtttcaaaaaataaatactcaatctcaaaaaatgaatgttcagtgctatctatacatatcgttgggaatgacctattcaacatgaatttgaaactgtaataagagaacatttttaggggtaacgatgtcacaagaaacacatttggatgcccagcatctactctcaaatgttgtggaagttagattaatggttttcaaattgttctaattgctcattgctatggactgaaagtttgtgctccccaaaaattcatatgttgaaatcctaactcccactgtgattgtattaggaggtggggcctttggaaggtagtgaggtcgtgagggtgggaccctcaagaattggattagtgcccttagaaaagacgcaagagttagcttattcttcagctctgctctctgccatctgaggagtcaaagagaaggcactgtctgggaagcaggaagcaaggcttccccagatgacagatctgctgacaacctgatctcagacttccagcccccaaaacagtgaggaataattgtctgctgtttctaagccacccagtcttttgaactttatgattgcaacccaaaatgggctaaggtgctcattttgtcaataaggaaatgaaggcttggagcaaagtgcttaaaatcctagttattaaatatttgcaccattaaccagactccaggtcttcctagtccagcatcatgtcacaatattagaaacgaccccaggaaagagctccaggtaggtgtcctcttctgaatactggcccctcacccgggcctctgcggtggtgctgatcacactgtgtggcatttccctgaagacaatatatgctccttgagatatttatctgattcatttttaaggggaaacaatcaatgcattaaataaaatgtatctggctcatttcaaaaaagaatacagaatacatctcacatacaaaatatgtttaagtatttaaaatatttgataggctggaaaggtcagacaagtaagattcctcttccctctgacagtgtgtgtctaaatgccataaatttttaaaacctgatgtattcacctccaacaccccaaaggcctaaacattttagtcctaggaagtcctgccatttccctgattccagcaatcaattatagggatggggacaagaaatgttatgatggccactgggatccaccatttggcatccaggtggcctttagctaagtgatgaagaggacatgggcagccaggtcacagagcattggcctcatgacccagaaccagaatctggggtaggtcatgtcctatcacaagcgaccctctaggggaatgcattaagcagaatgtcaggttgaatggaaatcacacatcccttcttcacacctttattcatacctcatgggaagggggagccacagtgagtctgtggaggaaaggaatgggggggcagggatcccaaatctacaagggaaactaagtcccagcttgaggaagcctccaaaccctgtctacttggtatcagtcttccacctttacctctaaagggatatcaaattagtacttctcatgagtctctggtcacctagccgccaagcattactttagtaattttaggactgtccccaggcaacgaaagtattaaatgacaactattattattcataatctcctgtttaaaagttttatttcatataaatttacataattaaaaatatttgtaaataaaatattgctgctctcggttgtgttcattatttgtctcatctacctacccaaggggaacacttctttcactgttctttcaaaagctaactttttaactttgaaaatgcctgttccatagacagtaagtgccaagttgaactcttagtcagtgtgagttgggtttaaccaagaggatacctggaagtgaggggtgagccatcgcactggtgaaatttcctgcagcatcagcaggagtcaggagggcaggggagaagcttcataatacaggcaggtgggctgaaaataactcaccatgcagggttctagaaattgaggaataagccttggtcacggagtagaacaggaattatgggaggcagtctatgcaaagtatatgcaaatcacttggaagagtctgtcacatcggaaacttcacatgaatagcagctgtactaagttgagcggtgtcaccccaaaattaagaaagtcctctggaacctcagaatgtgaccttatttgaaaatagggtatttgcagatgtaattagttaaggaccttcagatgaaatcatcctgaatttagggtgagccctaaacccaataattagtgtcttcgtaagaagaggagaggccacacagagacatagagaagaaccccctgcgaagatgaaggcacagattcaagtgatacggccacaagccaaggaatgctgaagaatgcctggggccaccagaaactggaagaggcaaaaataatcctcctctagagctttcagaaagagctcgaccctgctgacaccttgattttgaacttcccacctctggaactgtgagaataatttttttaagccacacagtttatgttaatgtgttatgacaaccctaggaaatgtactttagccatttttattgttgttatatatttatcaattgaacctttccaaatgaaaattatctttcaatttgcatttgatagtcaaattgaacttgcgtcacttttttccaaataagaaaactgggtcatgtattcacttttatttaattaaaagtttccaaaaaaaaaaaaaggtagaataggcgccagaattcaaaatttaggaacctattgtttatgtttctccaaaattcatttgtcgaaattataaaccccagtaggtgagggtattaggaggtaggacttttgagaggtgattaggtcatgaggatgaagccctcaagaatgagattagtgcccttatgaaaagacatgagagcttgtgttctgtccttctgctctgtgccatgtagggatacaaggacacagtaagaaggccaccatctgaaagccacatggacatcagcagacacagcatctactggtgctttgattgtggatgtccagcccctaaaattgagaaatcaatgtctgttgtttaagccacccagacgatggtattctgtgacagcagcctgagttgaccaaggacctacaaaatatttattaatcttcacaaatcagggaaatcatttctgcccagacaacctccactggggataggcagccctgtaatatccgaaattttacatatattcactcttccagcacgttaaacagcctcacctgcaaagtcccactttttctttcagtctgtgctttaatagtttataaaagccagaaatgtcatgggaaaccagacagaccacagagaagtcacacaaagaggcatgacctttgcacctgccactgactttctgggaacctcagtttcctcatctctaaaacaggtgtcctgggacacttggcaggggtaagaattgtgtgagatgatgtgtgaaatatgcacaccatcccagcacactgcaggcattgagctggcaccagcaatggtctggctatggctccgagcaccagcctccaacacttactgaatgaggggagaacaaagagtcacctcaaaaagtggcttcagcccctagcccccttgtgtgtagcccagccagtctgtcactgagaaaaccagtgactggagtggccacgtgtcaagggctttgggaacagaaagtcaggtccagtctgggctttctctaccagtgggaaaccttggtgggtttccagccttggcgagcctttgttccctcctccacaaaagaagatccaaataatccctagtaacctggtcgtaatacttaaatgatgtgatctggtaccaggacctggcagtgcataggcactcattctgtcttccctgacaagacccctgcatgaaactcagcgggtacattctcccctcctaggacacaagcatttttaaagagggttaaggtgtagagaagtccttttcttgggaaaatgattcacaaggcatctatggggagatattttcagtaggaagctgtgcaggagagctgggggtccacacactcagggtagctgtgagcagcatttccttgggtcatggggatatgtatctggaaaagggccaccgcccagtcagtgacatctctgccagggcctcaggcagactctggcccaaagcaaacggcaaagtggccaacagatcatgggctttgggtctgacagatctggattcaaataacagccacttccctgccttttgaccttaggcaaatcatgtagacttctctgagccacctcagtttccatgtgaggagtagggggtgacaatacctatgccaccagctatggcttcgcccaagcacagctcctggcatggatctggcagtaaatacatggggttttcctccctagtccatgcatggacctcagtggcctttggtttgtcagtttttttatattccttcgagatgaagttcatccatttaaaaaaataaaatacaaataagtttgatttagcaaaaatctgtgggtgacatttgctaaagttggatttatgtctcatttaatatttattgggattaagtcactgctggcctcaccccaaaacccatagaaaaagagaagctcaggtctttctaagggaagtcacgtcttacacttccccttttcaggagaggcctagtgagaatgtggttttgctccaggggctggggctggggtgggagcctggaggatcctttctaaaggctgataccccccagttattgggggcaagggggctgagaagcatttcttcttgaggcccatgtcaaccccatccaaatcccctcataacatcaagcagagcaactaagacagagccaagagcagcccaaccttggtcatggggaatcctcaccgtcctctctgtccccaaccctgtctatcctggggaagacagcccagaggcagacatgaccccactgtcccccggtgtagacacaatagcagcaaggaagacagcctgctaacctttctagaatccatttttctccacactcccacaccacggccttcctttcttgcttcttacacgcctgctgttagaaagatcttaattctggtgactgagggaaacacaaaatggtggcttataatcaaatcagcccagaagccactctgcacccaaacctatcacccggagggacgtgaaagctaattcttcaaaagccaaacacagtcgtctccttttccaagtcctgggattcagctgtcaggcctcatgaaaaccattctcctcaaggttaaaaccttaatgcactgtttgcacattgaatcaaaagaggtttgcataattaatggagcacagaaaaatcgggagacagaacgcaaagtaggttttaggagaaataaaaggcttgcaggaggaaggcatgccctcctgagtttcctgcacaagtacaaagacaccggtggaatcaaaaggcaggtcatgagaaccagccacaggggacctcttccagccttcagcacagggaggagaggaaacaagatgtctggacactgggtttctggagcaatgcttccactgtccttcaaatgtgcctcaaattgttcaagcaaactcagaacgtctctgccacgttccctggaacaatggaatgtccttgctgagaaaggcagggagcaagacgaaggcaggcaggcagcatttcctctacagacagacactgcgcagtgtcccgcagccccccaaattggggagggattcctcgcgtggcatcagtaaggggcgctcagcagaggcagcctggcatatggtgtctccaattttttagtgacaagtggcatgttagcagagctgcggaggagcggggagagagccggttggttaatcactccccattgcctgcaccctcaggcaaaatcatattgctttatgcagatgagttcataacagtttcttcaatttggcttttatagaaaaaagcgccagctcctcgcactgtgtcaacagccacccgagggcctagcactttacaaggcgagtgtattactatttaaagaccagcttttagctgaacatcagggctgccttcagagtttaattaccgccctccccatggggccaaatgagccatcgactcctcccaagggggttcggcttggtactgatctttaagtaagtgaacgctaaaccagctcatcttaaagcgcccacatctgatttcctgctctgctgcaagacagtaggtgactggtaatgacccgtgagcaatttacaatcctggatgtaattaatcttcaactgaaaataaaccagtaaaaaaaaaaatatatatatgtacaatataaaatatataatagaatttgtatttccttttctaaattatcagagaaagatctcaatagcacgtgcaatttcctgaaacaatttccaattttattacagcagtttttttctttctcctcttactttccttctcaatttgcaaaattgaatagaatgtgtttgaaaggccagggtcacagcctttctacatcctcaacagtgatcatcaaattagtccttttaaagtaccattaggtaggcatgactttgggatatataattgtccgttagaagacaaattaacatgtcaatagtagtacacagcgatattttatctgagagtggcccaaagaattaaaaatctagtgcattttccaaaagccatggaagaatcaaaatagggtaaaacaaggccgggcacggtggctcatgcctgtaatcccagcctttgggagaccaagatgggcaaaccacttaagctcaggagttcgagaccagcctgagcaacatggtgaaaccccatctctaccaaaaatacaaaaaattaactgggtgtggtggtgtgcgcccgaggtcccagctactctggaggctgaggcgtgaggatcacctgagcctgggagccgagattgcaccatggcacttcagcttgggcaacacagtgtgaccctgtctcaaaaaaaacattaaaaatgtcatttatcttcttgttttgagagaataccaacaacaaaaatattaaagatacatacatttaatttgtaacataaacaagcttggcagaacattcctaaggtgttgactgagttccaaacagaccaaggtattacattttcattctggaaaactcctgctgattcttcagtcatttacttcgagataaaaaaaaacaacaatgcatccagggctgtgagggtcccactacttgcgcttaggaagagaacagctgagaacggtaagcagtggtccttacactaccttctctcagcatccatatgaccaaacgaaataaaacaaagttccctgatatgtacatttgtgaccctgagttgaatcagttatgtctgtgttttaataggctgccaaccacactgagatactcaggcagcatgaaagggtatggaagacctaggttctaggcctgtctcataaggtgttacattttgggacaagtcatacttcagctcactcaccttcatatttaacaaagaaatttaatctgttatattgacgtttggaaaccccagctaagctaacagggagaagggctgtggtgaaatggtggtgatgaacaaacctcttagaggtacatcatgcaagacgagataaataatactgttaactaccagtatctaagctgagaaaatgtgctggctaagtcaacaggttgctgtatcctttacacactgacataaatgctgaaatgaatgaaataatgaaaagctaagcaaagagtcttgctttatggaggatccatggagcatcaagccctacgcttggtattttgagttcttgacgttatttacaaatgaaaagaaccctaccaaaatactagtcctacctataggaaatgtccgatatcacccagctagtcattggtatctggatcccagatccacaccaacaccgagccccaggcctgacactcagctcaaccaatatcctttctctgggccgtcctgcctcccagggctttctgctgtttagccatctactcaaaaatattttactagtcgggcgcagtggctcatgcctgtaatcctagcactttgggaggcggaggtgggcggatcacctgaggtcagaagtttgagaccatcctggccaacatggcaaaatcccgtctctactaaaaatacaaaaattactcaggcatggtggcacgcgcctgtaatcccagctacccaggaggctgaggcaggagaatcactggaacctgggaggcaggggctgcagtgagccgagatcacgccattgcactccagaatgagtgacagagcaagaatccatctcaaaaaaaaattgctttttcctcaaaattgccaccaagtgtctcaatccttgcaattgtcccttaggacagacccttctttccattcaacaaggtattccgaacaaacacattacgtctttgtggatatttctctagagtagtagtagctattaaaagaaaaactttagacaaatttaacagagtttaattgagcaaagaatgatttgagaattgggcagcctccagaaccataatatgttcagagtaactgagggactgtcacatggttgggataacatttatggacagaaaaaggaaagtgaggtagacaaaagggacgagaggcacagaaacagcagggctgcttacaggcttatttgagctcagtttgaatagttggatgcaagtgattggctgaaactgggatgctgtgattggctgagactcagctacttgttacagtgtagattacagtccctttacacgtccagttagatgacagttcactatgtacagagaaacctttaggtcaaacttaaaaagtgtagtgttaatgaaaaaagccaaactgaaatatttaaagaggtttattctgagccaaataccaatgaccatggcctgaggcatagcctcaagaagtcctgagtacatgagctgcaggtggttgggttacagcttggttttacacgtcttagggaaacataagacatcaatcaatacatgcgaggtatacattggttcagtccagaaaggcaggacatcttgaagtggttgggggtgttgctcacaggttataggtggattcaaagagtttctgattgacaattggttggaattgtcaattattccaaccaattattatctaaagacctggaatcagtagaaagaaactgtctggattaagataaggggttgtggagactgaggttcttattatgtagatgaagtctcataggtggctgcccttagagacaatagatagcaaatgtttcccattcagacttttaaaaggtgctagactctctgttaatctcttcaggattgggagggcctggaagatgaaagatctagttatgttaatagggattccttacaggtgcaaaatttcccccacaaaagacagctttgcagaaccatttccaaaatatggcaaggaaagatattttggggtaaaatattttgatttccttctttatctgttatgtgatattatactaaagttaggttggaatttggtatcttattgctatgaagaatctttctgtccatcttaggatctctattttaatgttaatgctgctcagtcgtgtctaaactccaaaaggcagagtgtataatgagacatgtctgatggcctctgttcctgtcatggcctgaactaccttttcaggtttccttgggtccctttggccaagagggtgtgtccattcagtcagctggggggcttagacttgtattttttggtttacagtaaggaggcagctgatgtaaagagataaactcagaaaaattgtaagagttctatttccagctgggcatggtggctcacacctgtaatcccagcactttgggaggccgaggtgggcggatcatgaggtcaggggttcaagaccagcctggccaacatagtgaaaccccgtctctactaaaaatacaaaaattagccaggcatggtggcgtgtgcctgtagtcccagctactcaggaggctgaggcagaagaattgcttgaacctgggcattggaggttgcagtgagccaagatcacaccactatactccagcttgggcaacagagtgacacttcgtctcaaaaaaaaaaagagttctcttcccttcctagacccttccaatgaatgagacagattccttgggttcacagagggagttaagaagagctgcctttagcacactgcatttctcaaatctgattcaactggaaactcacgtagtctagaaataggggtttactgaggaagatctgtatatctcccattgctgcagtgtgggaaacatctagaatgtgccacactcactgtcctgaaatcttctatgtgttagaaatgtttctatcttcttcaccaatcacctattctatctcagctattccacctgtgtgctgctgccaaaggttggcagcttcatctactttccatctgaaccagatctgaaactacatttaaatctaacacagctgaccaaatctacatgaaaattcttatctagatgaattagcatatacacaatgtttatgtattttcacctaccttcatgaactaatttcaccataattgatgccacataaatagttttgagactacaattacatgttttacacttaaaaagctttcatttcacccaatataataatgggcattattttctatgcttaaggactgaagtattacagcaattgtagtaaaaaagtaaaacattatacagctcatgtggaaacagctttctaatttttttaagactaagattaggatgcaaatccaacccggaaattgaaccatcactaagcatctttgttcatctgatcactgctcaaaaccatctgcactgaattgtaagatattaataacaaaccgtttaacaatcagctaggattaaaggacaaagcctcttagggacagtttctattggtggattttaaaaataaaagaagaaacagcacaagtcacatttctttctagattgtagaactccacaaaatgtttttgtttatatatttaagcagtgcttttatgaaagtaccactggacttaccttttatgccttggaaagggcatatgtagtatctgaggatcaagttcttctgaaaatttccagcaacttttagagatcaactcaatgacagtatgtcattcaaatcagcattttatattgaaaggcctgtggtgataatgtggaaatccaccaggattcccctgatgcaaggtttcaggaggtatcagttatttgtgtacaggacacatcccaaggccctgcaagaaggcccctgcattacaatgtataatgtaagaaaattcagatgtgtctaactctttgcaaacaaataagatttttacatatatatcattaaccaaatatacctttaattttttaaccaatccttcctcttctagccaacaactgtgatatctaaatgcttctcactcttcattcccaagataacacatccgtttgcacccaaaagtatattgcaaacacctgccagcaattcatgcttcaattctcaaatccatttcaacctgtaaatttttcttctgaattattttttttaacattctgtgacagagtcataggatcactaaaacaagactgttaaaaataaaaggttcatgaaagatcacctagttccattttctcatttatcatatgacaaaactgaggcccaacaggttacgtgacttatcctcctcagagcaaagccaagcggaggaggaaacaaaaaatcccagatcttgaatcagggtgcttgtcattgttgtcatttgtagaggtattgtttaagacagggtcatgctagatgtccaggctggaatgcagtggctatttacagatgtcataacgcttactacaacctcaaactcctgggcttaaacaatcctcctgcctcagtgtccttagtagccagtagctgggactacaggcatgcatcaccatgcctggctgtttgttttgattgttagtttttttttttttttttaatgcgacaaattgttggattaaacgaattaaaaacattttagaacataactgcaaacaataaaattagactgcttctgctaagtcttacttaggtgcaagatccaggggaaagggcagctatcattcttacaaaaatggaaagatagtttaaatcctggaaatacttgtctctgactaggaatgttttcccctggccagtaccatggggaaagttcttctgtggacctagcctttcagggacccctcaagtccttcaccttgtggacaattttggggaaatgagccaatttcgacagtcatctagtcaacagtaacaggaattccattgtgtactgaatatagtactgagtaaagaatatgagtaacaaatctcagaaaagtatatattacagagacggttatccactcacatagagggagacatactctcctcctatgctgtattgcactaaattattttttaaaattatagaggtaattcctatttttaggtattcttagaagatgacagaacaaactatatgtaaaatataaaatggattttggtaaccttctggaggatactaagtgtaatctctgctcccataatatttcatttttgtttttacgtttttgtaaccaccaacatgttgtactggaatttaacacttgacacatggtattgaaattgtttattttcttggtgatttcccccattacattgtgagccccttaaagacaatgttttattaattttccagtaggtagcaccaagcccagtacctagtgcacagaaggcattcagtaaatggtggatgaattaacaaataaaagaatgagtgagtgagtgaatgaaatgatgcatattttatatttcaaaaatctttatagtttatacatgattaacttgaatattttaaattcaatattcaggcattcctatcctcactttccagaaagcctgatgatgttaagtaactagctcagggtctcacatccattacatgagaaagccaaatctagaatccagatggcattccatttgcttggggaacacagggaagaaaaaagcacacgtgatcttgagcatttaaaacacagctctttaatcaggcagatattttccagatgcctataaaaatgttttgatagtaacatccaaagaaaaatagtcattcctcattaccagaacccaatgatatgtcatttccacagtactgagtttttgaggcactagtaattggcttctgaaaccttctaaatatcaagatcgagtaatgatatttaatgatgccaaaataagaatcagaatgaaattttaaacccacattatattgtatttaattatagaaaatgacatattaacttcctcatataaaacgtttattctaaatgtgaatgcagaacattttgtcaaatttcaaaccaacgttttttgttgttgtttgttttttaagacacagcatctgattctgtcacccaggctggagttcattagtgcaatcatagctcactataacctcaaatttctgctcccaagtgatcaacttgccttagccttctgagtagctggcactacaggtgtccaccaccatgcttggctaatattttttttaattttttgcagcgatggggtcttgctatgttgtcctgactggtcttgaagtcttatccttaagtaatcccccttcctcggcctcccaaagtgctgggattacaggtgtgtgagccaccatatacagctcaactgaggtagggggattacttgaggacaagttgggtgagagaggtacctgttagaagatactgttaaatgttccagaaaaattctgtcagtaagaaaaatagagtgtatagaagaaaaagtgatgtttaatatttgcttaaattttctctgcactttttctacctccaaaccaaatcactatatagaataatcacctttgaggaaagacacgtctaataatgtttataatattcagaagatgagattctatgtatttagtttactcttgaacaaagccacagtgtccagtccccacacagttaaaaatatatgtataaattttgactccctcaaaacttaactactaatagtttgctattgactggaagccttactgataacaaaaacaggcaattaacacatattttgtatgttatctgtattaaatacagtgttcttacaataaagcaagctagagaaaaaaacgttattaagaaaattgtaaggaagagaaaatatactactatatgtcttagtctattttgtattgctatgacagtatacagaggtctgggtaataattcataaagaaaaaaggtttatttggctcacaattctgatagctggaaggttcaagattaggcatctggtgaaaaccccagacagcttccactcatggtggaaggcaaaggggaaccaactgtgtgaagatcacatggagacagaggaagtcagagagagagaggggaggtaccagaatctttttaaatatcagctctggagggagctcacagagtgagaactcactcacccctgagggatggcattaacctatttatgatggatccacccccatgacgcaatacctcctactaggccccacctccaacatcaggggtcaaatctcaacatgaggtttgaagggaataaatatccatatcatagcactattcattaaatggaggtggatcatcacaaagttctccatcctcatcatcttctcattgagtaggctgaggaagaggaggggttggtcttgctgtctctggggtggcagaggtgggagaggtggagaaggtggaaggggaggcaggagaggcaggcacacccagtgtaagttttactgaaaaatatccacatgtaagtggacctgcacggttcaaacccatgttgttgaagggtcaactgtatatcaatatttactgctatggtgtggatgtggtttgtccctgccaaaacccatactaaaattttatccccagtgtggcagtgttgggaggtggggccaagtggaagtttttctggttacggggtaaaatacttcatgaatagattaatgccctccctcaggtgtgcattccccttctctcgggaattaattcctgagagagtatgttgttaaaaagagtctggcttatttggcttttgtctcttgcttctttttttcttttttagacggagtctcactctgtcccccaggctggagtgcagtggtgcgatctcagctcactgcaagctctgcctcccgggttcatgccattctcctgcctcagcctcccaagtagctgggactacaggcgcccaacaccgggcccggctaattttttgtatttttagtagagaccaagatggtctcgatctcctgacctcgtgatctgcccacctcgtcttcccaaagtgttgagatgacaggcgtgagccaccatgcccagctgcttccttttttcaccatgtaatctccctgtacatgcgcacttctcttctgctttttgtcatgagtggaagcaacctgaggccctcactggatgcagatgctcaatcttaaactttccagccatcagaattgtgagccaagcaaacacctcttcttaatttgtcagcctccagtattatgttatagcaacacaaaatgaactaaaatgcactgatacatatatacacacgcactgatatctcactagaccataccaagaaagacccaacaatgtggatcaacaggattttgctacaaacgttagcaatacctgtttactgatcctacagtatcttattgtgtagcttcacttaatatatttggcgttgggcatgtaaaaggttttcaaaagaccttgtatatttgcatagataatataagtatacttccataactagtatccaaggatcatcggtaaattagtttccatgtctttcattagtctcagatactttccatcacatatttctatcactgagaaaaacaggttatcatttgattatctctttatcagttgtcattaaaatgatctagaggccgagatgggcagattacgaggtcaggagatcgagaccatcctggttaacacggtgaaaccccgtctctactaaaaaatacaaaaaaattagctgggcatggcggcgggcacctgtagtcccagctactcagcaggctgaggcaggagaatggcatgaacctgggaggcggagcttgcagtgagccaagatcgcaccactgcactccagcctgggcgacagagcaagactccatctcaaaaagaaaaaaaaaaaaattatctaagttaatttcacttataaagcacagactcctatctagtaagtccatctatagaatgagagagtgaattatgttttaaataaacagagcagtctgcaaacggataatcaaatgatctgggatcccaccagtcatatctcatttagagcaagacagaaacattgatagttctcttcatagcttatgcatcaataaaaatattagatacacttttcttttttacacttattttcaaagagatggttcactttctctctgtatattgtaaatccttcaatgttatttttaccaagtttttgtcccttttcacaaaccatcctcgttatttttatcaccactggaattgattttaaaagcttgattattcttgacagggcacagaggaatgtccttcactacgtatgccaggatgaagtgaatttataagcccacaagtagatctgataagcatgcagaaatcatttgtattatgtgcataaaacagtgcccgattaaaggacagtcacattttcttctgacaaaatgtctgtggcactccagaaaacaggctttattttttaaggtttacctcataatgaaacaaagtttgaagtggaaactcttaaaatgcacaggtaggagatgcaatgatacaatccaatgcaataaaataaaataaaaccatgaatgagcacatttggaagaatgaattctccagttaaagtaggccgggcacggtggctcaagcctgtaatcccagacctttgggaggctgaggcgggaggatcacgagggcaggagattgagaccatcctggtcaacacggtgaaaccccgtctctactaaaaatacaaaaaattagccgggcgcggtggcgggcgcctgtagtcccagctactggggaggctgaggcagaagaatagcgtaaacccggggggtggagcttgcagtgcgctgagatcgcaccactgcactctggcccgggcgaaaagagcgagaccccgtctcaaaaaaaaaaaaaaaaaagtacaagtaaagacaaatgattttaagcagaataggaggttaagagaaacagcctctcatatttgagcacctctcaggatccacataggtatagaaacagagttcattagaagtttatgttgtagttctgggatctcatttacacaaaacacacaaatttgcaaacataaatatcaatgattcgggacctataagtcatatagaagtcagcttattgcaacatctattgaaatgaagcagttctaagatacttaagaactttttttccctctctgtaacggctgttttgatgcttttaaaattttctgtcttttttttttttttttttttctttgagatggagtctcgctctgtctcccaggctggagtgcagtggcgcgatctcggctcactgcaagctccgcctcccgagttcacgccattctcctgcctcagcctcccgagtagctggggctacaggcgcccaactaccatgcccggctaattttttgtatttttagtagagacggggtttcaccgtgttagccaggatggtctcgatctcctgacctcgtgatccgcccgccttggcctcccaaagtgctgggattataggcttgagccaccatgcgtggccaattttctgtcttttgaactaaacacttgtgcttaaattctcacccacgattgctctttctacactaaaatgtgaagatgtaggagcagagaggcagcatttgcagggagaccatgcatgttgtctcaatacaaggaaggctcttctgttgctccaggaaattagttgccctggatgtaggagttacctagagaagctcagacagaggctggaagataagcagtcaggtaggcaggtggctccagggggaccccctgtgtggggtggaaagctggaggtaaggatccggaaattcctggccagctctagatttcacaacaccacgttccccatgttcccggggaatattcacaagaaccctgatgccgatgtccaccccatccgtactgaaccaggtttgcacatcggtgttttcagtctacccgttgttaatacagcgactcctcgacttacagtgggattatgtctggagaaactcattgtaagttgaaaatatcacaagtcaaaaggcatttaatacctctaacatactgaacatcatagcttagcctagcctacttgaaatgtgctcagaacactcacattagcctacagttgggcaaaatcacatccaaaaaaagctggcaacacaatgcattgtagagtaccggttgtttgcccccgtgacagtgtagctgactggggattgcagcttgctgcctctgcccagcatcaaaagagagtatggaaccacatattgctagcccgggtaaagatctagtttgaaatctgaagtatggtttctactgaatgcatatcactttcacaccacggtaaagccaaatattgtcatagtaaagtcaaaccatcattgctcaaggaccatatgcttatgtaaaaatcccagaaaacaacttgagggtgtccactttgtttatgaggattacattaagtgtcgtatgttaacaaacattgacaaatgatgctttggggaaagaaggaaaactctgaaacggctaaatttcactaatattaccaatattaaatagcatagtgtatttggtaagagcataggctttcgattgataaggagccaggcttcatttccacacctatctaatgacctaaactacaggtgtggtaacagtgatgatggtaacagtctaaaatggcaacccagtagttcagattcaatgtgcctgcacccagcaccccctggtgttaacttaccctacagtcaacagttcttttcagggtacatgaatcctttgaaatataacctacaaaatatagattcctgtgtgtatgctgactacacgtcgttccattattttctcaccggcagaaagttcttaggaataatgtaaactcacttgttttcatttgtctatttcccctaactttgttttcatggtgacaggccactggttcctgacctgctatttgagacaatttatatgatcatcctttagcttctgcttcattcagtgataccccatttcctctattttcctctggcttttcttcaaatggtttatattttaataaaacgtggggtttgtgaaggtttttgaaaatgagacggttttcttatctttctctttccttttttgtttcaatcttaggtctgagcccagatctcccaacgacatgctttcatgaaacaataatgacgagaccgagtgaactaagctgtcttcagttttggagatgcagaggccaacactggcagttcctgacatcacttaagggaaaacaaagctaggggcaaaaatactaaggcagcctagatttgggggccctttgtatacactccaatttttaaaataacatctgggcatacttctcttttaaactcttcaatccacatatttttcattattaaaaagtgacttcggtgacattttcaaacactaaacaaacttagccatatgtccatttcactgactttccccacatcgtggtctctccttataagggatgggttccactcttgggctcaaatgttttgcttttctgtgtctgctcaactaacacacccctcctgatatggttaggctttgtgtccccacctaaatctcatcttgactgtaatccccaggtgttgagggatagagctggtgggaggtgactggatcaatgcagtagtttcccccatgcggttctcatgatagtgagtgaattctcacgagatctgatggttttataaatgttagtttttcccagactctcacatgctctctcaccttctctctcaggccatgtaagatgtgcctgcctccccttccgccatgattgttaagtttcctggggcctccctagccatgtggaactgtgagctaattaacctcttttctttataaattacccagtctcaggccgttcttcatagcaatgtacttcataatacacctccctagacacaccactcactcagagaaagctcagcatcatgtttactgtgtaatttctcctcactagtcatttgctatttatttctctcacatcatcatctcttcctgaactgatttttctactacctctgaaaataacagctcattagaaagtgatcagagattgagtgagcaattgaatataattacacaaaattatacagaccttaaaccagacgctctgctatgtgtatgagcctgggaaagccaaagccctgtatttcagtacccagtgctgctggaggtcactattgtggccctaaaagggaaagaggaaatgatccctggctgcaatgctcacaaaaactacttggatcctgccctagaaaaaggaccagagacagaaagggcagcaatacgtctgtcgcctgcacgacatgcactaaaagtcaacggctaggagagagagacgcaaaaacaaagcatcttatatttttctttttatttcaatttttattttagattcagaggctacatgtgcagaatttggctgatagagacaatcgcccggatttgctgaagcagggtgagttatccctaagaaaagcttacacagaagtggaagacagtttattatctaggagagccaccacatctcaaaatgtcaaaactgccagtgtgttcttgcacactgaaaccactcacaggtcaaccaactgtcttggtttgtccaggactctctcattttttttactgaaagtcatgcaactggttaacttctctgtccttgctaaacaaagatagtttgtctcccagcttgaagtcacctgagatcaagagatctactactaacacatcatagagaagcagcagaaatactacctatattttgaaatacaggtagtattatcattgatctggtggaactctgagaacttcaatccagaaattctcagagttccaccagatcaatgataatactatctatattttgaaatatatatatatatttgtttatatatgtataaaacaaaataaaaatttgtaaaacaaaatatatctatttgtttatagttatatgtttatatatgtttatatgtttatatatagttatatgtttatatgtttatatgttatatatatgtttacatgtttatatatagttatatgtgtatatatagttatatgtttatgtttgtttatatatatgtttatatgtttatatatagttatatgtgtgtatatagttatgtttatatatgtttatatgtttatatatagttatatgtttatatatgtttgtatgtttatatatatgtttatatgtttatatatagttatatgtgtatatatagttatatgtttatatatgtttatatgtttatatatgtttatatgtttatatatagttatatgtttagaagcagagccataaaaacaggaaaaccaaaacagaaagagcctcctatgaaaaagcacatttcaggggagaagggaggcagagtgagagcagagctgtgagcaaggccagccatgcaaaaggcacgcggctgaaagcccttggttctcaggcttcccgcccatctgagagatgcgtactctgtgccctgctgtttgtaaatgtcaaacatttaatgataaccacaataaatgtgcttggtcagcagtcctaaatatggaaaaagaaatcaacataaaacatctttggtagtttcttttccttaaaatcttgtgtcagaggaaagtacacagttaccactggaaacaaagtggttagggaactctacaaaacagaccactgcaggggaaaaaacaatgattttgagagtatgaattttcctgtgaggaacaaaaatgaaaacaatggtacgtttgtcccttccaagttcttcacggatgccagtaactaatcttcagagtaaatttggagaaattgttctgactatgcacacaaagaagctagagggaagaggcagtgttgctttatttactcagcgttgacctcccaccaccctcctccttcctctacttctctatcaatacttctggccttcctttgacctgttttggggcatggacttagggctgaggacagcaccaagtatctcgcctggatcctgccaaccctgcctcctacaaaaaggtcactttgagccactttgttcctttctctaggtctgtctctactcatgggattgttttcaagactaaatggaatgagcacgtgaaacgggaacctgccaaggctagacccttctgtgtcctattctgccagtcaagaaataaaatttcctaaaattttgtgtcttgccttaaaaacacacaaagccacattctttccataacaaatgcaagtttattttaatacctaattagggtgagaagctgcttggcaataaggagaactggtgtgccagcaaggtgtgctgtacagacctagttgctccctgtgcctccaaggtgagcacctggagattggaagggaagaggcccaggtgggatgggcagaggtggaggggaggatactgctcccctgacacacatgacccaacacggtgccatttccaaaatactttaaggccatgttgtgaagacaacaaagtaaagacataagacaggagccaagaagtgcagcctttgtatgcctgctgccttccagtagccgaggtactggcttctcctctccagccagacctgctctgctacccaccatggctactgggtgtctatagctgaatggccaatgcggctaatagggcttacatctcttgacagttgagcagccatttagggaaattagagacactgtagctcgaagaagaccatgaagaggaagttctactcttatagaacagagaagccatctgtgactacgtaataaactctcaggggtcagggtaggtgatcaggggtttttgagctgactctagcctatccacagcttctgactgatgctaatctcaaccaaagaatgccaagatattaatatgttcacagagaagcctcatgccactgatgtcatagaaataggtcacacataaggaacacccttggataagtgacatatcacacttacattggaattaatttccacaaaattccattgctgtccctaccttctaaatagcttctgaattatcatcagcacccacatgttcacactcagtgcctcgggggcttcaagatgtcccagaaccgcagccagcagcccagagtgtcttatctgaagaagggccatattgcctgtccacatgcatccttaacatcacatggaaagggggattcaacttcaacagagggaaaataccgccaggtgaatcactttcaactacacagaaggaatcacaaatgtctgcctccaaaacttcagagtcccagtttattttgtaaaattggactcttgtcactcctgtcatttccacacatgcaggtcccccagcatgaacgcatgaaccaacaacatgtacccttttatatcaactttacaccccagccaagagaagcttcatgaaaaacggcacataaagataactaaaacatgacttctcaaaccaaaagggtttaagtctagacgtaagccaaactctgtaaaccctctctgctaaatcagtcattaagatgtcatcctttttcctctttcacatatattattattgtcctacatttcatgtttcagggttttctccttagcctgctgtaagcatgtgctttgggagacagggcagaagctttggcactgttgacgctcagaaacggccaccctagatggctagtgatgctggggagtctctctggagacatcataacaagaatgccatggcctgaaacatgcttaccagccatcatccagagaagacaagacactgaaagtaatatcataaaatcttactaacataatcaagagaatcccatgtgatctactctgccagacattgctgaacttttgaccttcaactgcacctaagtagtttaagactctccagacattcattgactcttgcaagcttgcgtttatcacaatttagcttttcacaccgctactcaccacccaacacattattcattatgcaaaagtaatttgaattcatcatgcactggatttagcaaacttatctttaactgagtttcagattatttctaattctccctttagttcagagccatatgggctttgtgacacagaatgctttgaaaataatttcattggctggaacattcagtgggctgatgccacatttctttgaaaaaaagtctgctaggaagagaagtaaatatccccccacccaccactactgctattgccaggttcctccactcatgtattcatgtatttgctcattcattcactcattgaacaaatatgtgttgcaccctaccaaatgctgagcatcatacttgctgacaacagccttggcttcattggccctctgtgagacacaggaaagtggggatggacacaggttgaagatgacccaagtccgtaagcacaagcatcctttcagtgcgaaggagaaatgccaagaaacaacaagcagaaggggtgtaggcaacagaattattaaagacacataagcagggccatgttaagatgctcatgggtcctccctccccaaaaatcagtgttacattttatgactctgtaagtataaagacaaatacaatcaggctggattacatatgtttttccttctgattttaaaagaaattaaaacaattgtcatgggctccaaaacgtatcctggtttcagacactgaacttactgtgcctagcaaatagttggccccggctttggggcctcccggtcttccaccacccattaattgaacggcctttgtgcaaggtagctagctgcttaatgcctccttgtcttccttgctaagacgaaggaaatggaaatgaaagtgcctggtttagtgctcaggacacagccagagctctgcgtttccgcatctcctctccacaccaaataataacaatttgctctagaagacaatggacatccaagtgaaataaggctcaagggactgcagccgttttttattagttatccactagtaaatgcactaaaccaaagaagccccacttcaaggaacacagacaaacatctgtctctataattatccatacgccccaaatgcccctcctcatctcattccccctacttatcactctgaacatattctacaatggacttactcatcaggcccaacatctgtctcccctcacgggaatgccagctccacaaggtcaagggctgggatgttttgtttgctaatgtgttagcattcccaaacttagattagcatcaggcataacataagcactctgcctattcctcgttaaatggcatggatttgaaaattatcagaaacactagtttcaaaaacattaaaattcagtctttaggatattttgttcctttctataagaatttattctctacaaaactaccactcttgatctagtgtttttttgtttggttttttttttgagactgactctcattctattgcccaggcaggagtgcagtggcgcgatctccgctcactgcaacctccgcctctagtgttcttgatagtgtagataatcagtatgttttcctgtctcttcttctttccatttctgatacgtaaactatgtttgattgaagcatttagcaatgaatggggaatgcatgtgtaccacccccttcttcctgtatcaaattcttttctaagtcacaacatcttatctaaattttataccattctgacagtttcccaagaagcaaggagaaagagagcatattagcaaagttacttgtctatccttattaaagcacagtgtgttagtatggttcaaatatatatattttttttctttaagattgctggtctagttgaaaaaagacaatgaatttggattaatcatttccaatattctgattatacaagctaccccattgcctccaaaaaggagttctcccaggtcttagggtgttttttgtccttcccacagaccactgcaggcacagaaacactccaggctgtacattcaaggagatgcttaaggtatttatatgtggagacttatggaaaatacaaaatattaaaatgatattttcttcctcggggaatataaacttgtctccatttttatttaaaatgctggaagttatattgatttttattatagaattaatatagtcacatagtaaaagttttagtaaatacagatgggtagaaaggcaaaataaaaataaataataatcttacactttgagaataaaataccagcattttaatgtctgccctataagcagacaattttgtgcagtgggcagaatgatgtgagagaggccccaggagctcactcagggcaggctagacaatgagccaactggaagaagggggtcctcctttctgttaccacgagggctgtagcaggaggcctcttcccttggcagcagggcccacatattcccatgggcctcagcatctccaggtgctgggcagctggctgtcccagacaactccagtaacagctgatgcctaatcccagataggctgtttatccccctgcctagtagcatttctttggggcttacaagaagggagagtcactgggtgcaggagggtccctcaactggacacagacctacccactgtgcaggagagctggccccagggtgccttgctgttggatgatgtcaggattcacagccctttcattttcttgcttccatttattttcttccttacagtttattctttaacacatactgtgccacactgtggaatagacccttactcttgtgataaacagttttatgtatcaactgggtcaggctatagtttccagttatttgatgaaacccttatctaggtgttgctatgaaggttattgtgtaggtgtggttaacagctgtaatcaatttactttaagtaaaggagattgtctttgatcgtttacgtggccctcattcaatcagtcgaaaagatttaagaggaaaactgaagcttccctgagaaagaagaaaattgctcctgtgaactgcggcatcagctcctgcctgggagttctagccagccctttctgacagcctgccctacggatttcagacactctcagccccgccccatagttgctacagcaattgccaattcctaaaaacacttcaagcgcttcctcttcagatttctatctgtcccctatataacttactggttctgtgcctgtggtggaccctgactgacatacctcccttgtaccagagctgtatcagacctttcaggagcttcaattatgaataaattagaaatgacttctttaggtaaggtttatgaaacttggagtttttcctacttattttttgtgtgttcacactggatttcagatgtcaagagagcaaaatataaatttaaaatataaaaataatatatagaacatagaattagcaaacagcagaaaaaaaaatttgtggtatgaacgtaaggaagcaaggacaaatgtagtgaacaaaatgaatgccaaaagctgggatgagtgcaggagaactgaggtggatctctgcattccccaagtaccctgcagtggccttcaaaggctgagggcagtccattgatgcaaaaagagatctccccaggtacagaaagtcaagaacaggtctagagagcaaagagaatgccccagaaactcaaagagctggcaggcaagctgtaaagcagaaagagatctcccacagtttggaaagctggttactggtcagtaaagcacaaagattcaaagagtctggctggtgctcagatcccaagcccttctgaaggcaaagtgctgaccccaccttcacaccatgtgaacccaaggtaaagagaatctagctcaggatcctaactctgcaacagagcccagcacagcccagccacatgtcagattgactcagccccacatcaccagcccgacagaaggacagaaggagcatgtccttcctgcaagggcaaggtaaacattccttacttcaatctgcacacaatgtttagcataaaacagaaagtcacaagacacacaaagaaacaacaaaacaaggcccatgtttaaaagataactcattaacagaaacaaatatggaaatggcccagatgtttgatttatcactcaggaactttgtagctgcgatgaaggctctagaggaaaatactgacacgtgtgaacaggtgaagaactacagcatgggaagcaaacggtgaaagcaaaactcagatggaactatcaggacgtaactgtatgatactaggtaggaagaattcatttgatgggcttaatagcagactggacatagaagagaaaagaatcaaaggcaggccaatagacaatatctaaaataaaacacaaagaaattaaacatgaaaaaaataaaacaaagcatccaagacctgtgtaaaaatatcaatcaatataaacaattggaatcccagaagaagaagagagatacaggagaaaaaatattttaagagacaatagccaatattttttaagttaaggaaatacagcaaggtacatacccaagaagattagcaaaccacaacataagattttaaaaagttatttcaaaatcacacctaggtacatcagaggtgaaccttaaaagaaaaaaaaattgaaaagaaatcttaaaagtagcaagaaaaaatagcccatgttatatttaggggaagtatgaaaagaatgatggatgagttcctcacaatggaaaaaaaattcaaaatgctgaaaaaaaactgtcaacatagaattctacattgaattctacatttagtcaaagtataaataaaaaaataaaagctatagaagagagcaattcaaatattcttctcataaataaaatatgaatattcaaggtgatagatatctcaattaccttgatttgatctttacacttgatatgaatgcttcaaaaaatcacatgtatcctgaagatatggacatctaatatgtatcagtttaagaaaatgaaagctaagtaaagacattttcagctagagaagaactcagagatttttttagccaaaaaacctgtgctccaagaaatgcttaaagaaatgcaggctgaaagaatatcatacatgatagaagctcaaatctgcaggaaagaatgaaaacataggtagtataacatataggtaaaaataaaggacctacttattatatttaatatacatgtgtgtttgtttgtatacagacatacatgttgcataatatattaagcacatattaaaggttgagcatccccagtccaaatatccaaaatctgaaatattcccattttagtagagatgaggttttgccatgttggccaggctggtctcaaactcctgacctcaggtgatctgcccacctcagcctcccaaagtgctgggtttacaggtgtgagccactgcacctggcccaaaatctgaagctttttgagatccaacatggcattccaaagaaatcctcattggagaattgcacatttcattagggatgttcaactactaagtatataatgcaaatgcaaattcaaatcctaaaagatctgaaatctaaaacatttctggtaccaagcacttgggataagggatactcaacatgtgtgtgtgtgggtgtgtgtgtgtgtgtgtgtgtgtgtgtgtgtttgtgtgtacatatatatgcatttcagcacaaccagtagcaatgtgttataagttttatagaatacagtgaaacaaaagaatacaaagaatgagagaatagaattatataattgtgatagtcttagatttttttaaagtttagtataattgaaaattagactatgatagttaagtatacatactgtaatttctagcaaactcctaaaaaataacacaaagtatatttaaaaagttaattgctggattatgcaaaataaggcaggaaataagaaagagaaacaaatactggtaaaatacttaaatacaattgtattgataattacattaaatataaatgaaataccacttacatactaattaaaaataagattcaaataaatgacttttacaagaaacacttagagcataaagagatagatatttgaaaataaaatgttgaaaactgacatactatccaaccactatgcatcataaatctcgacggctatgtttatatctgaccgagtacaattcaagacaaatagtaacccagagagaaaaaggagtatattctaatgctaagagtcactccatcaagaagaagtaattatcttaaatgtgtatgaacctaataaagagattcaaaatgcatgatacaaaacttgacagcactaaaggaagaatgttgcttttgaaaagctcacattcaccatggaagattttaatatgcctctcattataactgataaaacaagtagaccaaaaatcaaagaacataggagattttaatactgtcaacaaaatttacataattatctctaatagaatactccactcaacaactatacactacaatttcttgagaagatcacatgaaacacttgctaagatgaatcacattctgcaacatgaaaaattccccagcaaatcataatgataaaattcatataaagtatgatagctgaaaacaataatattaaaatcgatcccagcactttgagaggccgaggcgggcagatcatgaggtcaggagatcgagaccatcctggctaacacattgaaaccccgtctctactaaaaatacaaaaaaattagccgggcgcggtggcgggtgactgtagtcccagctactcaggaggctgaggcaggagaatggcgtgaacccgggaggtggagcttgcagtgagctgagatggcgccactgcactccagcctgggcgacagagcaagactctgtctcaaataaataaataaataaacttgaaataaatgaaaataaatagctttaaaactactcaaatatttgaaaattaaacaacatgtttctaaacagatgatgacctatagaaaaaccacagggaaaaataaaatatattttgaattgaatgaaaatgaaaacacaacatatcaaaatgtgaaaggcagtgaaggtggtgcatagagggagattcatagctttaattccctatttgaattgaaaataataagttgtaaaacaaaaagttttagcttttaataagctaagaaaaacaactaaaatataagaaaggaaataataaaaacagcagaaataaaatgaaaacacataaaagaaaattaacaatgtgagaaatttgtttaagacagtttaataaaattggtatacttctagaaaaattgtcaagaaaaaatgaaaagaatctatatcagtaataaaagtagtagcatctctccaggttctacagatattaaaaataagggaatatcataaacaactttatgccattaaagatacagccacttatataaaacagattcctttaaaaacgcatcttatcacaactgatgcaagaaaaaatagaacatctaaatagcctaatacctgttacagaaatggaatttgtaatcagaagccttcccataaaataaaacaaaaacataaaagaaaaaactcctgactagatgtcaatatctaaggaaggcgtaataccaattaccaatccttcacaattttttttttaatagaggaggagggaacacttcccaaatgactttctgagactgcacgacccagatattaaacctacaaaaaacattataagtttaagaaaaaagaaaaatatcccttatggtccaatacacaaagatctattaaaatattagcaattggatgctataaacttaaaaagaataacaggtcatgaccatgtcaagtttattttctaatacaaaattggcttaacattaaaaatcagtcaaaataattcatttcattaacagattaaagaagaaaaattatataactatctcaatacatgtagaaaaagcatttgacaacattcagcttcttttatgagaaatactcaaaaaactaagaataaaagagaactttcacaatctgataaagggcatttacagaagatatacaaataacatgatatctaacactgaattattggaaacattccccttagggttaggaacaaggcaaaggtattcactcatcacttttagtcacttctaatcaatattcaacattgttcaagaagtcttaggtagtgcagtagggcaagataatacatttcaaaagccaaacaatgtcaaaaaagagaatcacataaggtgcctgattttttttttttttttttttgagacggagacttgctctgtcgcctaggctgggtgcaatggcagggtcttggctcactgcaacctccacttcctgggttcaagggattctcctgcctcagcctcccaagtagctgggattacaggtgcccgcccctgcacctggctaaggtacctgatttttaagactgcaataaaacattagtaatcactaccatctcaaaacaattatacaatttgatttctagaacaaccatattgtcaggcctctgagcccaagctaagccatcgcatcccctgtgaccttcacatacacactcagatgtcctgaagttactgaagaatcacaaaagtgaaaatggcctgttcctgccttaactgatgacattccaccacaaaagaagtgaaaatggccagtccttgccttaactgatgacattaccttgtgaaattccttctcctggctcatcctggctcaaaaagctcccccactgagcaccctgtgacccccactccggccctccagagaacaacccccctttgactgtaattttcctttacctacccaaatcttataaaacagtcccaccccatctctgttcgctgactctttttggactcagcccacctgcacccaggtgattaaaaagctttattgctcacacaaagcctgtttggtgatctcttcacacggacgcgaatgaaacatatataattaagacagtgtagttttggcataagacagacaattagattacgggaatagaatagagatctacacatatacggctctttttaaaaatcaaggtgcaaagccaattaggtgacaggggatgaaagcctgtttcataaataatattgtaagaatcagataaatagatggagggaaataaaccttgagtccgactcaactccttatgttaaaattaactagagaaaaataaaagaattaggcttcatcaattttttaaatttgctaattgaaaggcatcactaataaataggtaggcaggctacaaattaaaaacaaaatattatacttgacaaaagattcatacccaaaatatattaaaaaaaaaaactcttgcaactcagtagtaagaaggcaacccaagaaaaattaggcaaatgacctgaattgtcacttcccagaagaagacatatcacgtccaatgagcacatgtaacagcatcattagtaattagataaagacaaatttaaacaataatacaataccatctcatacacactatattggttaaaatttaaaatactgttgggatgaaaagttggagagaatatggagcaacaagaactatcatacatttctggcaagagtttaagtggtaccttttagaagttttataaagttaaacatgccatcccacttagtatttccccaagagaaatcctaacatatgttcacaaaaaggcttctacaaaaatattcataccagcctttctcctattagtcaatccctggaaacagcccaaaagtctggcaacagaataggaaaaatgtttagaaaagaaacaaagttctgaaatcagcaacaacatgtgtgaatttcagaagtattataatttaaaagaagaaatcagatacctaagaatacataccacttgcttctatttacataacaggtaaaactaatttgtgttcaaatcagaaaggattgcatctgggttgggtgcaggctgggacactgataattatgggagcaagggaatcttctttggggacagttaactgaatgttctacatcttgttttaggtggtgtcaacttgggtgtcttccaatgacaaaacatattaagctaaaaaatgatcagtgccttttattgtatataaattataattcaaaaaatcatttaagagaaaccatgagtttctgtttaacacaggagaacagagacaagttaagatagtggcagaatgggagaagacacctgcaacatctaaaatcaacaaaatttaatacttataatatatatatagaactcctgaaaaatccaacagaagaagacaggaagccccataggagcacaatgaaaagatataaatgcgcaatttttacgtaaggttcaaataaattatttcaaaactcctagaattaactaataatcataaaaagggctaagatcacgaaatatctttttatacctttgcatctatcaacaattagcgttgcacccaggcgagttagagaaaacgccacactttgagacgagtatacatatgtaacaaacatgcacgtcatgcacatgtaccctaaaagtataataacaataaaataaaaaaaaaaataagatgcaaattggaaagggcacgagagggtatcttagtgaaaattctatgtgaatttatatatcataaatttataaattaattcatccattcattcatatattatgaacaaaatatatgtaatgatatataaatgaatattcatttatttatgtattatatattcattcaccatcccttattatggagaaatttgaaaatataaaattatttactcaaaagctttattaaaaaaaaaaaaaaaagagtcctttattagccggcgaccaggccgcttccctcttaccagaaccagaacaaagtcaaatctgacctacctgaccccggggtgagaagctgaggactcagatgttgaattttagggcactgacacggtagtcgatccgctctcctccggaagacggtcactctttggggacctgaaaattgtttcctcaggtggcgcccccctccgagccggctgtccttccgggggagcccggagcgagactggctctcgcccagtggcgttaatatcttgctggggcctccattatgttgtatccaggcaagtcagagaaaacgccacactttgggatgaattaagagtcctttattagccggcgacgagagacggctaacgctcaaaattctctcggccctgaagaagggggtagattttcttttatactttggtttagaaaggggaggggggtctagttagaacaattttacagaagttaagtaggcaaaaagttaaaaggataaatgattacaggaaagtaaacagttccaggtgcaagggctttaagactactacaaggtgatagactcggggctttgggcgttatcaatcagacgaaatcctgggaactgcggatacagctcgccacagtatcttatcagttaattgcattcttggatgtgctgggagtcagcttgcacaagttaagtccttgaggaaggggctgccagtcaaagagccaagatggagtctatctggctctcttagctaagggagaatcaattcaggtggaaacaagcctaaaaacagagttagtaaaaacaaagttgggcattacattagaaaaccaggtatttgcaaggattggtgagtatataggaacagaagaaccctcatgcactgagaaaaatagagtgcaggctaacaccgtcacagcctagaggtatccggcagtatctagttaaacccttctgtgaatagcccagagacactcttacacaccttcagaaagggacaagttcaaggatgttcactgtagcaataggaggtgaagtcagttgggcttctgggtagggtggggacttggagaacttttgcatctagctaaaggattgtaaatgcaccaatcagcgctctgtgtctagctaaaggattgtaaatgcaccagtcagcactctgtaaaaacgcaccaatcagcactctgtaaaacagaccaatcagcactctgtaaaacggaccaatcagcactctgtaaaatggaccaatcagtgctctgtaaaatggaccaatcagcaggatgtgggcagggccaaataagagaataaaagctggccactggagccagcagcagcacccagcgtgggaccccttttgcactgtggtacctttgttcttttgctcttcacaataaatcttgctgccactcactttttgggtccacactacctttatgagctgtaacactcactgtgagggtctgcggcttcactcctgaagtcagcgagaacaagaacccataggaaggaataaattatggacacagcaagatgtatgatggggttgttggtcagttttagaatccatccctgggaatggggatacataaaatgtgcagtatagagaccatagagtacagtgcagcagttaggtgtcaggaatttaattttcaagtgacatggaagagttccagaaacatagtgtggatgaagatgaaagatgtataatacaacttgatgatgtaaattgaaacccacatgcaaacaaaacaacaatatgcattgtgcaaaacacagaaagatgcacattagcacatttgtaacgacagagggaggtagagggaatgggctatagggatcaaaggaaatcaacataaccaaaggggaacaattctcacacagaccacagcccaccacagaaagcaagcaaaagacctgatgggtctgtgtttttttggatcatctgaaagcaacaatacatatgaagttcagaggtacataattaaattataataaattaatttggattctgaaagcagatccaaaaaaaaacctcaataaaacttcagagtagacacagaagaaaaagaagcagtgaggaaaaaaagctgatttgatgaaatcacccaaagcataacacagaggggtagaggtaggcaatatgaaagaaaagttaggagatatagagaaaagaatgataaattccaatgtctctttaataggagacctggaagaagacgaaagaagagacaatatttgaagagctaaaatctgaaggagattctagaactgacaaacagccagaatccttggattctagaaagattacaagccaagcaggaaagaaacccatgtcttgcctatatgaaactacagactattacagagccagagaaatatattccaacctatcagagagaaaaagattactgacaaagttaagatcgtcgctagaaaatcattacaaaaattctgaaggaaaataaatgtcaatataggattccatctccatttatgttattagtcaaaaattaagcaaaacaaagatgttttcagatataagaataaaagaatgtactactatcagaccttcaccacaaaaaaaagtgaagatttttctttggtactaagagggtgtcacactcacatgtgggatgtcacgtagaaggtgggcattcagccattgtgagccacgtggtggcccagggtactcagctgatggtcaggcctctctcctgattggctagggtccgtgctacacggatcttcacttcagatcatccaccagaaccaatggtgaataacagattctagatctaccttggagaatccaactttaccatgtttaattttttttttttttttcctgagacagagtctcgctctgttgcccaagctggagtgcagtggcgcgatctcggctcactgcaagctctgcctcccgagttcaagccattctcctgcctcagcctctcgagtagctgggactacattaaattaacttttaaagactactgaggcctggtcggggtggctcacgtctgtagtcccagcactttgggaggccgaggtgggtggatcacctgaggtcatgagttgaagaccagcctggccaacatggtgaaaccccgtctctactaaaaatacaaaaattagccaggcgtggtggcgggcgcccataatcccagctacttgggaggctgaggcaggggaattgcttgaactcaagaggcagaggttgcagtgtgccaagatggtgccactgcactacagctatagcttgggtgacagagggagactctgtctcaaaaaaaaacaaaacagactactgagaacgttaaaaagaaggtagattttaaaattgtaattaaaagagcatggaaagtagaaaaaaatcaatagaacttatataaacttccacaccagtagaagaaataaaggaaatagagaatcatctaatggggacaggaaaggcgggtgggctggaagacaatccaagaccaaatgcagtaagtggaaaacacccaatgtaccagaagccaaaggaaaaatatatgtacctacatgactaactaaagaaaaacaataacagattttgaaaagtatcttgtggagcatagctatggtgtttattagaaagaagtgtataggtttaaatgcatttcttttttgaaaaagaaagactggaaacaaattagctcaatattcaatttaagaagcgagaagaatgcagtaaactgaaaggacttcgaagaaagatgataaaatacaaaacaacaaggaattgaaaatgaaagctgtgttttgtttttaaaaagacgaataatatagtatagaaaaacatctcagcaaaacacaaatgatcaatgggaatgaaaaagaagacaggactctggataaagcaggtccttttaaatcgtaagagaatcctttaaacgaagaagcatatgtggtcctctggcagaagctggggaatgcgctgcagcctcaaggaggtggcgggaaacctagttttagtccccaccctcaggactgagaccaccttttgctagttccatgggctgagcagctgtttatggcactttgtgtcaatctctgagccagaagtgttcacctaggaccttttataaatcttatctctgaaactggtgaggtatacactctcatccctgttttacaggcgaagaaataggggctcaggaatgtcaaacagcagagccaggtttgcttagccagttagtgggcaagccaggtttcaaacccaggtttgtcttattccaaagttcataatcctaaactgtagcaactttctcacttcctcccaggtgtgagaggaggggagtggggatggggacagaaactgggagaaagtgtgaggtcagcattgacatttttcttcactctttccaaaatacgactttctgcttttgccagcccagcagaagctatttttcccactgttaggtgggcacatttgctacccaagccttccaggggacacaggtgttagctggaaacagacaaaaaggcattgagtttggtaattcatggctacgagtttattcttactgcctttaaagctatacagtaacattttcatatagaagaatttctttcttttaatttttccttgtaaaaaaaattaacaaagtaacgcaatcaaacatattttcaattccaaagtcaaattgtatcctctaaggataccataaaatgtaatttatttgatctgcttatttttaattcccagatcccatatgctagggagattagcaaatactagtgaaatgtggttgagtcacaaggtaattactttagataaatgtcattctgcagtttaggattatggtcctaaagcccagtatttaacggtacctgattaagccctactgggattggctatatagtcctggggactgtgtataataaaactctataaagtaacatccataaatcagttcttcttcatatattccagtggttgatttcaggcctaaatctgcatcttgctgaagtgttacaatagtgtttaaataatgagaatacttattatttttaaaatgcatccaaaaacacctatatcaaatattttcacggtgagtttcggtttgcaggtttttaattttctgtgagtccaaaaatgggacaaaatatacaaataaacacatactcacatacacagaaaccagattcagagaccaagataactaacagtcccagccgaaaggatcaagagcaacacattcttaggttatgtattataaatatatacacatagtatgtagtaaacatagcttttgtaacaattcccaaaaagtggttttaaagttcaacattaagcatacaaggagagatagcaaattagagacataaacacacataatacatattccaggaatttgcagtcactgggattctgtacatatactatgtacataaagataagacctggagaaaatgagctctggttagagagcatctgcgttttactaataagtacttactagaagttgagatgatattttgaacattgccttactagaagcaagagtgtctagaacacagtgccctatatttggaaacactaagtgaacagaacccatcccctgggccagatggagcaatagatttaacctagtgggaactgtcctttggtaaacaaaggaattgcctttatatgtactgcacactgatatttgagcaatggaaaagcaatccgatatttgcaacagactattaaagtcattactagatgagagatgaattaaacttaccaaaaaattttaggaatcagtaaaaaaatatatatagatcaaggatgactgactatgaatgaactattgaagaaagatcacttcagaattcaggcaagtacaaagtagaatcacaaaaggatgtttagaaaaccagtactgaagtttccaagagatccattttataaatgtaaggcaaaagaaataaacatcctgggcacagccagcaacgcaaaggttaccaggggccagtacacattgtaccatctgaagcactcactgctttttctgggttgaggacagattatattaacaattccagactgggtttgatttccattgatttcgtatctggctgttcaatttccagagagttgtatttgtggtatatcaactttcggaactataacccacaaacgaacccacagacacgaatatgcttctcggcctggtacatggaacacgagctggtcctctgccctcccttcttccaccacacctgactctgctgtccccacctgtctcttcccaccctcacctcaactttaagggacctcagacctaccaggggagtgggaaggaaaaaagagaagaggataaagggagagaaaatgtcctagtttttaaaaaatgccagtttccttttggctggaaaactggttcagaaggaaattccttgagtctttcaaatattcaaggaaactaataaacacccagagtgaaccttaatatacactatgtccactgggtaataatgatctttcaaggcaggttcattgataacaaatgtaccactcttgcgggggatgctgataacaagggaggctgtgcatgtgtgggatcaggggtgtacaggaaacctctgtaccttccactcggttttgctgtgaaatgaaacctactttaaaaaataaagtctattaaaaaaaaaaaaaagcccagatagtaaaggatcaaagtgagtaaaattcagtggcgtttttctgtattttgaaaagcatgatacctctgcattaaggaatgaggcaaaattgccagtgtgcttggaactatgcccccaaaaacctgtaggggaaaacaattctgtatcagtcagaaaagacctcatttgatccccacttcccatatgtgccatggaaaaatccataagaaaagaagcacagagaagctgatattcctcccatgaacttgcctgttggggtcaggttccgctccttggtgttacacaggggcacaggcatagctcacctgaagcaccagtaactccagtttcagagccctagttacctcatggtagaagtaaccaggtcaagcctaggtgataaatgaattacatatattttgcaaatccatctgcaagtcagataaaaggaaccttggaattatctcaagatgtgaagctggagtgttatcagaatgacaaggattgagatcaactttcatctcagaagcgtcggcagcagggcagtgaggtgctagaaaaagcatagaaatcaggaagaatcgcagaatggaagaatgaaagcagagggtgcccatggcgatgtgcggagagctgcagtctgcgaagtgcttttacattcatcaacatcactgttctcatcacacctccctccctcaaagaagcagcagggactctgcaaagtcaggtcagcagggcccaaacatggcagctccctggaagccctgaagagctctgcacagttaccaggtcctgcggagggggttctctcggtccaggaagcgctgtaggtgggagctatgaacctgaaattgtcaaaaatccatcttggtgattctgatgctccacagatacaagaacactgatacagtttggatgtctgtcctctccaaatctcatgttgaagtgtgaccctcagtgttgaaagtggggcccagtgggaggtgtttgggtcataagcgtggatccttataaatggcttggtgccgtcttcacggtaatgagtgagtttcagctctattaattccagagagagtgctcccaagagctggttgttaaaaagagcctggcaccaccctcctctcgctcttgcttcctctcttgtcatgtgggaggccatgtcaccttgcctttcaccacaagtagaagcttcctgagggctcaccagaagccaagcagatgctggggcaatgcttcttgtgcagcctgtagaaccgcgagacaaatcaacttctttttttttttttttacaacttacccagtgtcaggtatttctttacagcaatgtaaaatggactaacacaagcacaaaaagggttggagagatgggaaatattggagctcattagatccatgaagatactctattgagtgttaaagaaaaatgctgcgtgaacccgggaggcggagcttgcagtgagccgagatcccgccactgcactccagcctgggcgacagagcaagactccgtctcaaaaaaaaaaaaaaaaaaaaaaaagaaaaatgcttaaaagaacacatatgcaaaagtttacaagtggtaatagatctacaagtcttttttaaagcacagcaaaatacatgggcaatttcagagaggatctattttttcttgtttaatgctgaatgaagaattattccacccacctctcagcagtagtgactgaccaaataagagggtgttacggtttggatatagtttggcctcaccaagttgtaggtcgaaatttgattcccagtgttggaggtggggcctagtgagaggtgttttggtcatgggagtggatccctcatgaatggcttggtggtgtttttgcagtaaagaatgaattatttatctactagttcccatgagagtgcccctgagagttggttgttaaaaagagcctggcaccttccctgtgctcattttgtttgtttttgtttttgagatggaatttcactcttgtcactcaggctggagtgcaatggcactatctcagctcactgcaacctctgcctcgcaagttcaagcgattcgcctgcctcagtctcctgcgtagctgggattacaggtgcccaccaccacacccagctaatttttgtatttttagtagagacagggtttcaccatgttggacaggctggtctcaaactcctgacctcaaatgatccatccacctcagcctcccaaactgctgggattatagacatgagccaacatgcctggtccgtgctcttttgtttctgttcttgccatgggatctctgtgcagtggctcccctttgccttccactgtgaacagaagcagcctgaagcccacaccaaaagcagatgctggcaccatgcttcttgtacaacctgcagaaccataagccaaatgaacctatttctttataaattacccagtctcacgtaatcctttacagcaacataaaagcagactaacacagaaaatcttgtttgactgttctgtgtcccagagacagagttgattaaggaaaatgacaacactgcatcttgggaaagagtgttcagaagcaccccacccaaagctgttatgaaggagaaggatgtttcagcccagcgctcctcaaacttcatttgcataataatcactagaggatttgttaaagttcaattccgattcaggagatctgggtagagcctgagattttgcattcctgaccagcttccaagtgatgctgacagtgacagacagccttaaggtgcaagatatttctggtgacattgctgtatatatttccaagaaggtgcgagaggtgtggacaaagatccatgcttgaaacccaacttgcccaagaaacacatggaacactaccctgccatgtcaatacttacgcaatcctcagtttgtttctaaagcaaatttctgtacctaacaacacaatatgacagtcttaatagcatataattagacaacagaagaaggctggactctaagtggtagcaaatatgaacatttggggcagtaaccacatcacacagcatctaaaaaggaaaacaaggcactaattccagatacaaaaataaagaagagcagatgagtaattcaaggagtacattagaggacacaaccttttcaaaaataatttttaaatctagtaaaattattatacttaaaataatcttgtgatcaacaaacatacaaaaaaggctttgggagcgaattaatacgtgtaataatctcatcaatgaaacaagggtccattggagaggatatgaaaaaggatatgtatcagagacttttaactgaaaattacctcaaaatcatctaatttgtatctacccgtatttctgatgagaacactagggtcatgtcttagctttaagcatctaattttcatgacaaaatctgggttataactcacataatcacatatttttcccaatacaatgctaatccacacactgattttagtgagtataggttaattacagcatccattcatgttggaaaatgtttattaagttttatacaattttttatcacatcagttaaagaaaaaaatggtgtgtaccccgtaactggctgcattaccaaataagtgggaatgcatagtctttatcacaaaatgttgtttatcatttgataaatccttctcaaattttaagaatgcctttcaataaacatcatctctacttagcatctctgtcattgaaattttatgaaaagtataatcatttaaatagtaagagtaatttttttcagtgatgctgcagcacaagttttagcccaaataaaatatattgtaaaggtcattttctgatgtacaagccagatattcttttttcaagcacttgcaaagcctttgggtgtgagctggagttgaaagttaaacatcaatttgcatttggtttaggaaatccttgtcaccttttcatgaaatttcagctgtctcagtggatttggcaagatcaaagcccagcactcagtcagccccagttttaatccctgccaacagtcatcatttgattcttgagcacaaagagctactactggtgcactgctgcccacagtgctatgacttcatgcggccttgttttcacctgcttccattcagctgggtgcatggcttccaatattgcagagatttgcaaaattggtacaaggagaatctaaactgcagatgccttcagctgccaggcatggacttaaaggcgttcctgatccacatgactcaggattacagccacagaccttggcgggcccctcagctgctctgagaagaggcaggatctacctgactccaaagaacactcacttacaattgcattacctacccctctgatattaggttggctcaaaatcatggattttggcattaaaaggtaatggcaaacatcacaattacttttgcaccaacctaatatatactgtcatatattcaggaaaaaattactttgtgaatgtcacatggttaatatcaacattagtcagaacatctaaagggggaatacccttgtgatgaatcttaaataccgagcaggatggcaaaagtctttataataaacatgaacaaatgcagtaagtttcagcaagtggtgatgaggaaaaactgtggtgaaatggacatttttagagcaacagactctccttgttgaaagcatggaggctgtttacttttgttttactatagattcataaaaagtgatggataaaaatggttgtttagcaaagtaataaataatgataatctaatacaaatatttagtatggaatgctcatgaagattctagtttttcattctcccatgacctagacgaaagaaaaaaagacaggttgttgtttttctttttttctgcatgtattattcaatttgtaaaattctacatgtggaaaaacatttaacaagaaaactgaataagaacaaagggaattatgttgacagaggaagaaaaagaaaaactttattctcattgaaaagaaaatgcaaccatttatgtgaagcaaaatgaatcacaatcaatgatcagtattctgtagccatattttcaggagctggatttttcaactgattaattaggaactcaaactgtatgtgtatgaaaaaaagtagactggggcaagttatttcctgtgacaatcccagccgtgctaccatatccctctccacttctctgtcttgttttccaaagaccatgaaaataactattattcacaacgaaattgcaatcaacaagtcacttttttctcatggggaataatcagtgaagaaacagcaacccaccctgcagctctcacctccaaaatacaatttctatgctttggcagccaatacagtacaattaatgtttaactccatgctttctatctaaacaaaatgaaataataaaaactaataaattagttcgggcacagtggctcatgcctgtaatcccggcactttgggaggccgaggtgggtggatcacgaggttaggaatttgagaccagcctggccaatatggtgaaaccccgtccctactaaaaatacaaacattagctgggtgtggtggcatgtgcctgtaatcccagctacttgggaggctgaagcaggagaattgcttgaacccaggaggtggaggttgcagtgagccgagatcacaccactgcactccagcctgggcaacaaagcaagactccatctccaaaaagaaaagaaaaaaacacacaaaaaacaaaaaaccaactaataaattaccacccttttaagatataaggtatcataactaaggaaagtgagactagaagcttggcatttttgaaatcatctttggcaatgtatatgacatcaaatgtacatgaatagtgaagaatggagtttgcaatctagcatgtgcggtcattacaaaaccatcctcactgctaaacttctgcacacaaactatttgagaatattagatttattacactgctttgtcctctggtagcttatgtctggataacatagccaaaaattatgtacaaatgaactggctcactttttttaatctgtcactccaagttaacactctcctctcctatcactcagcagtttcttttaagatgtaaaaataaatttaaacctaataactcctcttcctgagaactgaattggtagatattgtgtcttcaatcaatgggaattagtaggcagtttccgtcattttgtaagaaattccaaacactgaatatgaatctccaatgtaactaagaaatagacccaaagtgcaacaggatttttacccacagggaagaccaagcctaggctcaaaggcctagattcatatcccaggtctgcgacttacatggaagtatgtaaatataaaatattaacatgatatggacaatggcactttgataaatgcaagattcgaatatcccctatttagtgctctatcattaggtccactttcttaacccatgcttgggccagaggggcacattaatgagccatggagcccctgcaggggttctgccccatgcatttacagctggaattaaatcccatctccaccactctgctcccagtgtgaacatggggaaagttgattaaactctctgacttcagattcctcatgtaaaatgtggggaaacagctctgacttaatggtgtcactgtgaggagtaaatgaggtaacatatttaaaggattttgtatagtgctggtgacagtaaccagccaatagatgatatagctagtaatagcaataataatgtcacttactattactttaaaaaataaatctcaaagtcaaaaatactaagaaactaacaagagactatacttgggtctcccttttgtaacttttgaacattatctcacttctgaaagtcctgtaccaatattatcctcctcatttctcaggtgaagcagcatcttagaggggtattgccctgtctaaaccatctggttatcatggtgaggtccaggattcttccctttcctcatctttgccttaaaaacatgtattctaaccaactgccttagtttgtccaggctgctataacaaaatgccatggcttattgatatggtttggccgtgtccccacccaaaatctcatcttgaattgtaatccccattatccccataatccccatgtgtcaagggagagaccaggtggagataatggaatcatgggggcagttgccccatgctgttctcgtgatagtgaaggagttctcacgagatcacattttttttaggtgtttggtagaacttcctgcattcaatctccttcctgccaccttgtgaagaaggtgccttacttcccctttgccttccatcatgattgtaagtttcctggggcttccctagccatgaagaactgtgagtcaattaagactttttcctttattaattacccagtctggaaacagaataatacacttataaacaacataaatatttttcctcatagttcaggaggctgggaattccaagatcaaaattccctcatcaccattgccaataaagtactgagtatccacctgttacctaaacacgcaatactagttgttatataaagccatttgttaaaagcctccttaccattcgatataagtaaagaggaaaattgtatgttaacttgttttctatcccagtatgacagacatttgaaacagataaaaggagtgtacttgtgagggtatgttatattgtgtggaatagaaagtgtccactagggttaaatttcttggaataattctattaaaaatgagtttggaaagaacaaagtgaggtaacaaggtataaatatacataaactctagggttgttcccaagaagtggtcatagttataatagggacaaactgaattctaatttaatatttttcacttcaatcccttaaccatatgccaagtatacgttggcaatacaaatggcccaggctatttggagaaaatgcattcgatttctaatagcttaccaataatatgtattagcttgttggacccattttacaaatgaaggaattatgtgtcatagaaactacattatctgcccaagaattaaagagcaagaaagggacagggtcttactttgaccttagccaggactctcccccatggcccagctgccttctggcattcagaattgctaaatgtgtcacatttaagaaggtagtctacaacatcctgctggcattcagaattgctaaatgtgtcacatttaagaaggtggtctacaacatccaggaaggcagtaataccccattaaagttttagagctaagtacaattttgttttctttttcaatctgacttttgcatatataaaatgttaaatttttcaggtgagaaattactctgataatgcaattagtctgtaaggagtttaggtagttatcctaaggcaaggtaacagtaaggatacttcaaatacttgaaatatctgataaactatattaactcaatatctatcaaatatcacatactcatatgagcttgtatgtcttatttttaataagttaaagagactcaaataggaagcaaaaggtcaagttattatttggttttggacaatggcttcctgctccaattgaaataaaatgtaaagacctcgctatcatttttaaggtgtagtggtttcacccctccctgtctctcccacttcactgaccacttccttaactgtccactccgaaacaccccttcttcctgttcttccaatacaccaaactctttcttgcctctgtgtgcttgcccatgctgttccttctggcttcttccttcacattcaagtcttgacttagatgtcacttgccaagggagaccttggagaacccttcctgaccatctcatccatcaccctcaccccatgtcatctctacagcatcactctgggttattttcttcaccgcacttgtatcaccatggattatatgtttattgtccttccctctcacagaatataagccccatgaagacacagatcgaattctaacttattgctgtccccagcccttaagagttcagaagaactcacaagcacgcacatatttgttgagctaatgaattgcagatattgtaccagtgattaaatggaaacgaggttttaaaagatgcaaaacaaaatacatttgacgaagttaaatgtttgaagagccaaaatagtttctggattagagttcaaaattagtactaaaagtattttctgccctaaactgaagtgtggtactgccttagaaacctgttaacttaaactacactatttaagagttaaagcatatgttttatatattggaacttcacaaaaaaggattttttaatttttttttattaagtctgtgctattaataattcttgaaattgttggtccttggaataaaggccaaactcctagacttatgtcatggttttgtagcctcaactatcagcattccaatccttcaccttttcatgatgtttctcttttttttttttcctctgtttttgagatggagtcttgctctgtcgcacaggctggcaggcagtggcatgatctcagctcactgcaacctctgcctcctgggtccaagagattctcccacctcagcctctcgagtagctgggtctacaggcatgctccaccacaactggttagttttctttgtatttttagtagagatggggtttcaccatctttactggtgaaaccagttggccaagctggtcttgagctcctgacctcaagtgatccacccaccttggcctcccaaagtgctgggactacaggcatgagccactataccaggctatgatgtttcaatattataaaactatttaaaattatctgaaagcatcatgtatcatggtcatgagttcctcactgttattttactattcagagctagaatgctcagtctgagccagttcagcttactttacacacaggaaatggaggttgaatttccaagcgaccgagtgatccatttctgatgttcatcagtaagtcagacttacatcttaaatagctgctaacatttgctacctatctacagatgttttccgctaaatctcatgttccaaaatagaaggttttaatcgactcctatgaacacaggttaaatagcatattttgttgttgttgttttcgtttatgctttttcagaaagttacttaggtccattcatttatccccctatatttgaaacaaaattctgctttcttacaagccccttttcagttaatctcaggtggctatcatacttaaaattgtggagaattattttcatccataaggcctgtaggaagatgcccctacctcaaaacttattgggataaagtcaaaaaagggtcatcctcttaaaggtaaaacaggaaaatattaatcaatcctagatttggaacaataatacactgtgcaatagagtctggacatgtgtggctggtgggtggagattctgcaaagccatgagtccctggaaggtaaccagcagactaattttacagtgtgacatagcttatcacaatagcggacaggaacctgggtttaaagaggactcacttgggcagtaatcctggcctgtcgtttcaggaatatgaccttgggcaagatacttgtattctttgaatctcactcttatcatctgaaaaataaaaacactaacgactgtctcaagactgctgtgagtattcaataaaataacagctgtcaggccattagttagcacaatatttggcacagggtagggggtaataaagagtagccatagagataatgttgggatgatggcctaaagaggatgctggagcacagttaggtgtgaacagagggtcgcatgccataatcataatcaataacttgtagataatcaataacttgtatgtagataaaaacttgactgtctacagtaacagatgtgggctctcaactgggtccagcaaatggaacaaatgattgtgtttttggtgttactcaggggaggggaggctgatgccaagacagtaacctcagtctttgtagagggaaccccatatgctaaagagatatcgcttgagaatgtttcatgctcttgagcccaattctatgtgctccctgatggaaggacaggtaggtattgggtgaggtgagcaaccaacacttactgggtgcaccttcaaataggacaccttctgaagtccccctagcccaggcagcacagggcaggccttctttggtgccaccaagtgcaattgtgtttccttcttattttaccatctgctatgcatttctttccatatccatgcctataattccatgagtttgggaggctgaggtaggtgaattgcttgagcccaggagtttgagactagcctaggcaacatggtgaaaccccgtctctccaaaaaatacaaaaattagccaggcatggtggtgcacacctgcagtcccagctactcaggaggctgaggtgggaggatcacttgcgcccaggagatcaaggctgcagtgagccctgatcacaccactgcactccagcctgggtgacaaagtgagatcctgtctcaaaaaaaaagaaaagaaaagaggaaggaaggaaggaaaagagaagggaagggagagaagagaaaaaagaaaagaaaagagaaattgctagggaaaggcacatactgggtttccaagagccatctctattcgaaggtgtgcaaaagactcccagtgcttaaaggcccagccaagctctgccctgaaggccagggtgctgtttgcctcaggaacgggaacacaacctttgtagctgaaagtcagctcttctgaacctcctcacataaaacacttatcaacagaaaagatgaggcacaacctaaccacatactctggttccaatttataagaggatcagatccaaatatagtttattacattgaaagggatgttctgatgagaatccatttttaaaagaaaggaaaatagcaaagaagcaagcaagttgtagcattactacagtctttggatccaaacatcgcgaatgagaaatgctttaggcaaagtaaaagttttgacctgaatgagacgaagtatcctggtacctaaagtcatccctgttggtaatgggatccacaggcggcaaactgtggcctctgtgctctgtgtgagtgcatgtgcgtgtctggactgattcttaggccctgctggcctgtggttttcctttgcgcaagaactagcacaaggcagagcactaggaccagcctgttttctctgcagtggtttgctgagcccatgctctgggggtaagccttaaaatggcacatgagcttgtagcaagaaggaccctaatatcgtcacatcaacacggctgactcacttgtcccctaataatagacaggtactacctagaaaagtagatgttttagaaaaacactaaagatatttttatatctgcaggatcggtaccactctccagctttctgatacttgctttcaaatataagagtgcttcccctacatgacacctttttaaggaaggactaattttaaagcatattagagcccatattctgatattcattgacgggtgggagttgatgagcgtaaggtgactcagaggccctcaatggccatttttgtcaaagagcttattgaattttgtgggtattattcagttagctaaaagaaaaaacatcttatctactcagagttccacagcacaaagaaccaaaagttctttcttaattggagaggttggaaagtataattatgccgtatgcttggcaggtaaatatcttaaaaacaagaacaacagaacacagaattgtggtaatttcttgcaacaagaaaatgtcttgaagatgacctacctcctgcacccctgaccatactgggtgatacgaaatgtgcacattaagaaaaactagtgaactctatttagataattttaagggaaacatagaatgatttttatgtgatctacgacctgaccacattacagttttatagctgaaaatcactcttggggaaaaataaaatagctcccagtttcctcattttacaaatatttcatatatatatatatgctcatgttcctcagtattccagaattcatcaaaagataataggtaaggcagcatgatgttatattaaaaataaaataaacagcatcatcttctacacttgtcttttcccttaaaatgaaaaaatgaaagtttataaactcatttgtaattaagattatagctgtttacaaatatttttgctagttaattttaccaacccaattaatttatcacattttcagaaacccaaatctaataaaacacactctcaataaatagtaagcactcacaacataatgcatatatttagccgttatttctaagccaggttggctattactagcttcaactaatttttgcctgactggagggcactgctacaccctgagagcaatattcacagggtaaagaaaaataatctacttttcctacatgaccttgtgtatttcatatttatgttttatttcttgggaaaatatcttcttcaaacgaaatgtctcctttgttggtttaatgacagaaatggggtactaagtatttcacagagttttaggataaaaaggttcatggttctaaatcaaagtttgcaagccggttttttttttttttttaacctatcttttttacagtaataggctttttttttttttttttttttttggagacagagttttactctgcctcccagcctggaatgcagtgacatgatctcggctcactgcagcctccacctcctgggttctagctattcttccccctcagcctcccaagtagctgggactacaggtgcccaccaccacgcccagctaattttttgtgtttttaatagagacagggttttgccatgatgaccaggcaggctggtctcaaactcctgacctcaggtgatccatccgcctcagtctcccaaagtgctgggattacaggcgtgagccacagtgcccggcctatttcttagaacagttacagatgtatagaaaaattgaggcgatagtagagagagctcccatgcactgtcccctgccactcccctatactcaacttcctatattatgaacatcttgcaacagtgtgaggaatttgctgttaactaaaggccgcgatttacattaagctgtactctgtgtgttgtacgttctgtgccttctgacaaatgtataatgtcatgtattcaccatgctagtgccatgcagaatagttttactgcctcacaaatccctggggtttgtcctgttcatctttccccacctgccaccttcacatccctggcagtcactgacatttttattgtctcagcatttgccttttccagaatgtcatatggttggatccacatacgatgtggctttttcagacttgctttccttgtgtggctgtatgcatttaaggtgcttcctgatctttttgtagcttgatggatcattcttctcatcactgagtaaaagtccacagttcactcactcagttgctgaagaacacttcggttgattttagttcggttgcctttagtaaacattcatgtgcagatttttacggggaaataagttttcaaattatttgcatgaatgccaagaagcgtgattgctggatcctatggtaagactatgtttagtttgtaagaaactgccaaactgtttttttttttttttttttttttttgagatggagtctcactctgtcacccaggctacagtgcagtggcacgatcttggctcactgaaacctccgcctcctgggttcaagtgattctcctgcctcagcctcccaagtagctgggattacaggtgcacgccatgacacccggctaatttttgtatttttagtagagacaggttgtcatcatgttggccaggatggacttgatctcttgaccttgtgatctgcccacctcggcctcccaaagtgctgggattacaggcgtgagccaccgcgactggcccaaactgtcttttaaagtgactctgccgtctctgttactccacatctcatcagcatttgatattgtaagttttttgaattttagccagtttagtagctatagagtagtatctcgttattgttttaatttaaaattatttaacgacatataatgctgatcatcttttcatatctttatcttccacttctgtgtcttcttaggtgaggtgatcttccagatcttttgttcttttttaacattggatcatttgttttcacattgttgagctttaaggctgctttatatatttggatacaagtctttttccaatatgtgtttcacaaagattttctctccatctttggcttgtcttttaacgttctcaattgttcaattgtgtcttttgctgagcagaaggcttttttttattattattattttactttaagttctgggatacaagtgcagaacatgcaggtttgttacataggtgtacatgtaccatggtggtttgctgtacctatcaacctgtcatctaggttttaagccccacatgcattagctatttatcctaatgctctccctcccttggcccccaaccccctggctggcctcagtatgtgttgttctcctccctgtgtccatgtgttatcattgttctgggacacagctaaagcagtgttaagagggaaatttatagcactaaatgcccacatcagaaagccagaaagatctcaaatcgacaccctaacatcacaattaaaagagctagagaagcaagagcaaacaaatccaaaagctagcagaaaacaataaataactaagatcagagtagaactgaaggagatagagacacaaaaaatccttcaaaaaaatcaatgaatccaggagctggttttttgaaaatgttaacaaaatagatagattgctagatagactagtaaagaagaaaagagagaagaatagacacaataaaacacgataaaggggatatcaccactgaccccacagaaatacaaactaccatcagagaatactataaacacctctatgcaaataaactagaaaatctagaagaaatggataaattcctggacacatacaccctcccaagatgaaaccaggaagaagtcaaatctctggatagaccaataacaagttctgaaattgaggcagtcattaatagcctaccaaccaaaaaaagcccagaatcagatggattcacagctgaattctacagagttacaaagaggagctggtaccatccttctgaaactatttcaaataattgaaaaggagggactcctccctaactcattttatgaggccatcatctcctgataccaaaacctggcagagatacaacaataaaaagagcagaagtttttaaattgaaggaagtcaaactatcttagctagcttgggttgctataagaaaataccatcaactgggtaatttatgaacaactgacatttctcacagtgctggagactggatagtccaagatcagggcaccagcagatttgctgtcttgtgtggagctgctttctggttcatagatggtgattcttgctacgtcctcacatggtggaagagacaaggcagctctctggggtctttattatatgggcactaatctcattcacgagggcagagacctcatgatttaatcacctctcaaaggccccacctcctaagactatcacaacatatgaattttggggagacacatacatccagaccatagcaccaacttattaatttgtcctttcattcgtcatacttttgcggttgtatctaaaaagtcaaaaccaaacccaaggttacctagacttcctcctatattatcttttagtagttgtattgttttgcactttatatgtgggtctctaatcaattttgagtttttttgttgttgttgttaaagcacgtattgtaaaatatttgctaaattttgtgtctagtttctttcacacatggattttcaggtgttccagcattatttgttgaaaagactatcctttccccattgaattgtctttgttcctttgtcaatattcagttgaatatatttgtgtgcatctgtttctgagccctcattctgttccattgacctacttgcctgttcttccaccaacaccagaagctagtgattaccaaaagtcttgaagtcaggtaatgtcagttctctcatggttcttctacagtatctccttgcctattctaggtcttttagctttccatgtaagctttagaatcagtttttcaatgtgtaaaaattggcttgctgagattttgattgggatgactctgaatctataaatcaagttgagaaaaactgacatcgtaacaaaattgagtcctgtccatgacaatagaatctctctccatttctatatatcttgtctatttcattagagttttgtagttttcttcatgtaaatactgtccagatgtagttagattaatatttaagtgggttttttggtgctaatagaaattatattggtttttcatttcaaattccaattgtttattgctggtacattggaaagcaattgactttcatatattagtcttgtatcctgcaaccctctatgactacttattaattccagaaatttttttgttaactgtttcagattttcaaatagactaccatgtcatctgtgaacaaggacaattttatttatttcttctcaatctgtatatattttatttccttttcttgccttcctggattagctcagacttccagcacaatgttgaaaaggagtgatgaaaaggaaaatcttttacttgttccaatcttagagggaagaaacttattttctcattattaagtatgatgtctgttataggttttatgtagattcttttttccaagatgaggaagttcccctctattcctagtttgctgagacatttttatcataaataagtgccggttttaccaaattcttttttgcatctgttgttatgatcatatgattttcattcttcagcctattataatgcgataggttacatttcctcattttctaatgttaaagcatccttcaatacctggaataaatccaaatgcatcatggtacattattctttttatacattgttggatttaatctgctagtattttattgagtaattttgtatctaaattcattagagctattgatctgtagttttcttgtgatgtctttatctgttttggttttaggataatactggcctcatcaaatgagttagcaaatgttccctctgcttctactttttttttttttttttttttttttgagattgggtctcactctgtcacttagtctggagtgcagtggctagatctctgctcactacaacctctgtctcccaggctgaagtaattctcccacctcagcctcccaagtagctgggactatagccatgtgcctccatgctcagataattatttgtattttttgtagagacagggtttgtcatgttgcccaggctggtctggaaatcctgagctcaagcaatccgcccgctgcggcttctcaaagtgctgagatcatagtcatgagacataacgtcagctcagcttttatttttaggaagagattgcaaagaattggtatcattttttttctttaagagttggtagatttcactagtgcaaacactggtgcctgatgctatcttttttggaaggttattaattattgagtcaatttctttcattgatataggcccattcagaatatctgtttctccttatacaaatcttgatagtctgtgtccttcaagaaattagtttatttcatccaagtattcaaatttatggctacagggcttttcataaccctattatccctttaattattatccttttaacatctatgaaagcattcctgatgagttctcttttatttccaatattaataattcatgtcttctttttgcttgatagccaggttagaggtttaccaattttattgacatttttaaagaaccagattttagttttgctgattttctctactggtttcctggtctcaatgtagctgatttctggtctaagttttattattttctttcttctgcttgttttaggctgatattgcacttcttactccagttttctaaggtggaagcttcgactattgatttcaaatcttttttcttttctaatctatgcattcaatgttataagttttctgtgaagcagtgatttcattgcatcccacattttgataggttatattttcatttagttacaaataatttaaatttcccttgagatttctgctttgacttatgtgttatttggaagtgtatttttattctccaaatatttagagatttgcagctgtctttatgttattaaatttaattccattgaagtttaatttcattataatcaagaccatattttatatgatgtctatgattttaattttcttgagatgtcttttatagtccagaatatagtcttggtgaatagaccatgtgaatttgtaaagaatgtgcattctgctgttgttcatgaagtattctatgaatgtaaattagattcagttgtttgatggcattgttacataggtcaactataaccttactgattttctgtctgctggctctgttaactactgacagaggggtgctgaagcccctaactataacagcaagtttttctaattctgcttatgcattttattttactgtcatttattcctacgaagctcctccttttgttatgtaaatctgaatttctgacccatgctattttcttctttctgaatacattcttttaacctttcttaaatgttaaaggcaggtttactggtaacaaattccctcaatttttttgtgtctgacaaaaatctttatttctccttcacttttgaagaaacattatgtagacagagaattctatcttggtgggttttttgttgctgttgttactgttgttgttgttcaatactgtacatttcactccactctcttacttgtgtagcttgtggcaaaaagtccagtataattcttagctttgtctctctacaggtaaggtgtttttctctggcttgtttcaatattgtctctttttctttagatttctgcagtttggatatgacatgcctaggtgtagacttttttgcatttcttttttttttttttttttttctgagcctcttggatatgtggtttagtgtctatcattaattttggaaagctgtcagctattgttatttcaaatatatcttctgctcccttttctcctttttctgggattctcattctgcatgtgttataccttttgtaattgtcccagagtacttgaacagtctgtttctatttttccattcattttttttctctttgcattttggtttaaaaagtttctcctgacgtatcttcaagctcattgattctttcttgtttatatctagtctattaatgagctcatcaaaggcactttttatttctgctacattgcttttgagttctagcacctcctttaaattcttccttagagtttccatttctgtgctgacattatccatctgttcttgcttgtcatctacttttcctattagaaccctaattctgttaatcatagttaaattccatatccaataattccaaaatcactgccatatatgagtctggttctgatgcttattctgtctcttcatatgtattttttcttgcctttcatttcttgtcattatttgttgagagtcagacacagtatttgggtaatgaaagctaatataattagacttttagcatgaggttttacatgaatctgggctgtatttaatgtttgatgtagctgcaggtgacacagcctttagtttctttatctcacttttctctcttgttgtctttgtgtttccctaggaactcattcttgaatagaggctgcatcttgcagctctcttagctgtaattcactggtattattttggagccttgttgatgtgatgctgaggtgttagggagaggaagctctccatactcttaagataaaatctcagcttgcagtatacccaagtccctggattgtgactttcagatgtgctttgtggttgtgtttatttgtttgtttgttttttagcttttcttcctcctcctatgtgaggcaggcaggatagaagggggcaccagtggctaattttcctttcctcaagttggacaatgttctggtaaggtagccttccttgaaggacatggttttcttatagagaatgcaatgggcttgcttcaaatacttaccttctcacttcccatgctcagaactggaggggatttttctctgaccttcatgtgagaatctggtgagcttcctggaggaaaaactcaagaaagctgtaggggctcctaggaaatattaactctcaagcctcacatacttagtctccagcaattcattgaacttaccatttacgtgttcctaccaatcactggctccgcaagcttctgccccctgtaagctgaccttggctctcattctctgtgttgacctgtctctccagattgcagaccagtggtttgccctgtgacctcaatcctctgatgaatccagaaaagtcatagattttcattctgttcagctttttttcatgttatgagcccaggagtaatcacttccaagctctctgggtgccctcgctgaaaatcaaagtcagcaaactttttcttacgaagggccaaatgataaatatttttggctttgagagatacagagtctctattgcagctcctgaagtgtcctattgtaatatgaaagtagccataaacaaaatgcgaataagtgaacatggctgcgtcccaatacagcttcatttacaaaaaaaggggttgggccacatttggcctgtgagccccattttgctgatccctgctctatacaggctacagaatgaaaggccatcaggggccaagacattagtaaacatgagcaaaggtgaatgggttttaaacaaaaaatatgttcttcacttatatatgtgcttaatgcacattctttttttttttttttttttttttttttttaagacagtctcactgtattgcccaggctggaatgcagtggtgcagtctcagctcactgcaacctccacctcccaggttcaagctattcttctgcctcagcctcccgagtagctgggattacaggcatgtgccaccacgcccagctaatttttgtatttttagtagagacagggtttcaccatgctggccaggctggagtcaaactcctgaactcaggcgaaccacccaccctggcctcccaaagtgctgggattacagatgtgagccactgtgcccagccaatgcacattcttatttccataaaaatgttatatttcatttttctttaaacaaatactctactttagataggaatatgaatatcataaatcatttaatgcttctgaattataataaagagacagccacacaattggcagctggtactctgtctcagtgttggtgttggggccacgagggggtgatggggacattgatgagctggagtgaagagcaccaaagccactgctggagctgccaggtgggaatgagagcctgcattgccagatttataattcttccagaggagctggaaatccagattttatgttacctttaaaatgtttagtgttggcaactattcaaaataaatttttaaacattgcccaggtcaacagtcaaacacaaatatttgtcaagtacaaatcctctagctggctaacattggctggcttgtggttgaatttggcctccaacccaggccagccccaagttttaccaaacgggtgcatgggagttaaagaaggtgcccaaggtcacacagccaggagacagcagagtgtgacctgggctgtagtagctgagcagcccacttctgtatgcgagctcacagctcagagcaaatgtaccttttagcttccatggaatgaacatctctctgctctgttttcagtctgatatggtttggctgtgtcatcacccaaaacttatcttgaattcccacatattttgggagagacctgctgggaggtaattgaatcatgggggcaggtctttcctgtgctgttcttgtgacaatgaataagtctcacaagatcttatggttttataaagggcgagtttccctgaacaagctctgtctttgcctgctgccatccttgtaaaacatgacttggtcctccttgccttccaccatgtttgtgaggccttgccagccacgtggaactctgagtccattaaacctttttcctgtataaattacccagtcttgggtatgtctttattagcagtgtgaaaacacagtcccaccactgagtcattttcttccactgatattaagaatcctcgtgtttacattcttacataccttttcagaaatcaactaacttcacactcttttttcaaaaagcacaattatgtttcagttaatcagcaaaaagaactaataaaacaatcacaattatgcctgtgctgtgaaatcacagcaagataaatggttccaatcagtcaaaggaattctacaaagaacatcatatataagaaatgtgcttcaagttatttggatccaaatttcatatgcctcattctccctttaattctgattttttttttttttttttttaggaaataaattccatcttttcagggatttcatctttttagaaagcgatattctttctttaggggaaaaatgaaaagaagcatgatatggtttggctgtgtccccacccaaatctcatcgtgaattgtactgccataattcccacgtgtcatgggaggggcccggtgggaggtaatggaaacatgggcgggtgggggtttccctcacactgttctcatgctactgaataagtctcatgagatctgatgtttttataaggggtttccccattcacttggctctcattctctcttgcctgctgccatgtaagacgtgcctttcaccttctgccatgagtgtgaggcctccccagccacgtggaactgtgagtccattaaacctctttttctttataaattaccctgtctcgggtatgtctttatcagcagcaaggtaatgaactaatacaaagcaattggttagaatattcccacattgagaggcgccattccataggtgccactttggatggagaaggaagttggtacagggccaaggtcccttctcagaggctgcagtgaagagtgagtgaggaaggggggagtttcaggagggccctggcttgctcttggtgttgccatcactcttgttcctgtgatccagagatcttcaaaagacagaattatcacctctaaagagcaccataaatggtaggaggagactgattataaaatatacataatcctcatgaattctgctgaagtatttttctagtggcagtgagaaattatcctaaaaacgtgatgacatcacatctcattctatttcatggctacaattttgaaatgccatagcagtgtatttttctggcattagggataaaaattaatattttgaaaatatatttgaaactgcaaagaacagcaaaatatcctgtgattatatgcaaaattaaaattagggagaaatggttaggtgtgttgagcagagtaacaaaaaagaaaccgtgccattgtataccaggtaacattgtatattttctcatttcctaaacggtgttctaaggaaaaataagagatacagctcaaaataaactgttttgtgcccagataagctctggaaaaggttagctgaagtgaaacaggtgtgttgacaacagaatatctcagcacttttagtgtgcttgtatgcgttgtattcttagtagatctctactatgaggtatttttcaagtctattgaccatcaaagcccatattcaaatgcagaactttcaaactctccctgagaagtatttaatggaacacaatttgggaaacattgattcattttaattgttgggaaatttaaataaattcacatatttagaaagttaactttgcaatactcttaaaggatacaacaattttggtttgaagtgtaccagggacctcttctcttctttaaatttaaggttattaattccaggagctaccactcgttttcaccctgggtaatttgcaagttctttctgggtaaagtgttttgaataagttgaattgcttcagattgttattaattaattaattaattttgggacagggtctcactctgtcacccaggctggagtgcagtggcacaatcatggctcactgcagcctcgagctcctgggctcaagcagtcctccatcctcaggcccctgcatagcttggactgcaggtatgtgacaccatgaccagctattttttgtatttttagaaaagatgggattttgccatgttgcccaggctggactggaactcctggactcaagtcatctacctgccttggcctcacaaagtgctggtactacaggcatgagccaccgcgcccagcctgcttcagatttttaaatcacgattttgccgttgttgtttccccagatgggtttagaaagagtgaaactatgcacatcatatgaaattttcaatgccagaagaagcaattcaacaaaattgttgccataaaatttgtactggagcaagatagaacacctgtttagttatcaattaataccttttcattatgttttgcctggctttctgtctcctttgcctggctttctgtgcaatgatacctgggctagggttatttatgatttgtagcaaggacggcaattaagatttatgcttgtggggaaatgcttggcatctctgctctgtgagaataacacaaggtagtgatctttctaatcctgcagtgtggaagggatgaacttctgtgagaaaaggaaagatgactcaggaaggggagagcattgttaggactgaattgttggggaagatggtaaaaaagatgttgggaaatatcaactggaggagaggtaagtggataaaatagaaacccttattagaattaggagctaatgggaggccagcatttgctttgacagaggacaggcaggccttgcctgggaaagtctagctccaggatgggcagatggtggtgagactatcacggctgcctcaagctctggttagattcttattactcagtgctcttatatcaagatgattctggtgacagtccaacaaagaggtcacagttcacgtgggattaatttaaaagaggccacaatcctgcctcatagggagacggactatttcttaggttcacaggatacctttcttgacaaccaaacacctttaaaacaagcacggggcttgggacatagtccacacgaacatctcgaggattctgggctgagaaacagcatatttaaatctctcatcaaaaatgaaattcagaaagcccagcgagacaatatccactctttactgtagaaagaaaaaaatgcccacatttctgggaggaaattgcagaccatctgctgccctgacggccactcggtgtacatttctcccctccatctcggacactgcacccagccgttgtggacctgaacttgtgtcctacctttggtttgccccttcagcaaactgagcaaactagagaaataaggcaaaccaaggaacagccctagatgtctgtaaagagcccagcacgggctgcccatgaccctggggctggcaaggccccatcccctccatcagagtagaagcggcttccagcttccggtgggaacatatgtgcttatacgactttatgtgtggggctgtgtgattctgccaaagtgcttgaatttggcacttctcctgtgtctgattccatcccctcccctcccccaataaaaatgcacttccataggctctgcctctaatctgcataataagattcagttttacatgaaccatgtccacgacctcagggccaggcatcagggtggccgtcacctaatcatgtttccctaagtgtgtttcatgggaggtgaatatccaaggtcttaaaaagatgagacctatgcaaggtccagtcagctttgaaatgcactggcttagagttaacagcagttttgctgcaggacttctcagggcttttgatatgttcattgcaaaccctctaaagagtgagagtgcttgcagaatttctccaagtacatttcaccctagaaccttctcttcagagcagctttgtcccacaaaatataacatgagacataaatgtgaactgcatatgtggtttcagattttcaaaaagtcatataaaaatgtaaaaagaaacaggtgaaattagttttcaatttttttttttttttttttgggatggagactcaccgtgtcgtccaggctggagtacagtggcgcgatctcggctcactgcaacctctgcctcccgggttcaagcgattctcctgcctcagcctcccgggtagctgggactacaggtgcacgcctccacccacagctaatttttgtaattttagtagagactgggttttaccatgctggccaggatgggctcaatctcttgacttcatgatttgcctgccttggcctcacaaagtgttgggattacaggtgcgagccactgtgcccggcctagttttcaattttaataatactgttaggtaacacagcgtatcaaaactattatcatttccacatgtaattcatatgaaatatcaatgagacaattgataccctttgatgtgacaccatgtctttgaaaaagggtatgtattttatggcaccctcaattcagaccagccatactttgactgcccaacactgtgtgtggccagggctaccctactggatggtgcagatccagcatgtctcaggagactattatttcacaaagttggtgtcatttgagatgcacaggtaagcactctttcctaaggttggctaatgtaatgttgactcattagtaaatatttagtaagtgccaactgtgtgcaggacagttttctaggtgctatgcaaatagctctgaaccacacactatgcccttgccctcatgggacttcagtgaagcatatactaaatcacacaactaattatttgataattctggatgctaagacagggaagcttgactgcacccatgggtcagtggaggttgcccctactaagtgacatttaaacagagacttggaagatagcttggctttagctaaacagtgtgcaaagagaggaacatgaggtgggacaaccaccatagttagagaaataaaggatcagtggatttgaaatacacagagcaggactcagagagcacattgtgagatgagtctggtcagcaggaacatacaggctgtttggggtgagtgctggattctatctgaaaagcaatgggaagccttggaaggttgtacgcttagagggtgacatgatccaacacgattttatagaaattaaatatgtcttcaagttctttgctgctctgctcattgagatttataatttaattcccctctctctttgaattctgactggtcctactgacttgcttgaccaagagaatctggtggatgtgaggtcctgagatctccaagttcgggtccttagaagccttgcagtccaccccagtctttgggagaacattctcttgaagccctgaagtgtgactacccagaaagcaccatgctagagatagcatgtggatgggacacttggcaatgagctgaagagaagcaaatatcagctcatgaatgacaatgacctctacaaatccccaagtcagatttgccgcgaggagaaagagatttctgtctactggccattggtgtctacccagcagaggtcctaggcatcctggagcagacgggagttgctccactgagtcctgtccaaatctcatgtttacaaacatagccaatggcagttttaaggggatgtttgttatacagcatgaggatgtctgttatatgttatcaaagggttttgataatccctctggctgaagtgtggagatggacaaactgcaagggaagaaggacatgtgtggacaatagtaactgaaccagaatgtggcaggaatatggaaggcagtggctgagtgaagacacactgagaggtcaccctgaaaaccctccctgtcttggtagggaggggagattgttgttttctccatttctgttttctcctccttcattttttctttccaggttcaagaattaagacaggaatctttaatccttgtccctttactgtctttcccatatgttttcaagttggctcaagagtattggtggccacttgaccaagagagtaacagatagatggctgtgacagatggtgtgtagtatgtgatgacgaaaatctctattgattcagcctcagaaagaatatttgggtttatctgaaaactgcacatcatggtcaagtggcttaaaaataaaattaagttagataaagattaaaacatatactctcacctcattgtagctaattaaaagtcactaaaatgttttaaataggaacaaacattattaatggcaaatagggaaaagtgttcccaaaaacctaactgacattccattgggtacatttgtctatggtttgtgcaccaaagcaaagccacatcccagcaccactttggaaaatacatatggaatgctgtttcactggttcatttaacagtgatattttcatttgtgtttatctatagtggttttatattcctaattcttaaaaaaaagattttttaaaaattgtaacatctaaggcaaaattaaacaagagatttctcagaagtctctaagaaaaccttctgtcctgtgcctcattaattcatcaatataatgcaaattaattgccactgcattaaaaaaaaattgttagaatagagatccggatgtaaaagttgccctagcatgccgcactgctgagacgagctattacagcccacttttccacttcactttagggggatctgtagctactagttcttctttaggaagtaaaattggctgcacctgggcatattattagctgctcaccacagggaatctcatgctgatgggctataatttagcagagaaggaaaaaaaaaaaaggcaatccaattaaaatgaagcacatcacttggtgcccatttgctgattgcttgtcagaatctattatcttgtatttaacaaatatgggataattagaaaaggaatgagtatgagacaatcaaaatttggggagcaaatcgttatccttgcacaaaagaaaaactctgagtcctcctaatccatcctatcaaaggaaaaaagcacacccatatattcccctgtgagatgcacagataatttgagaagactcctgtcaaccagtcccaccccagtcccaatcctggcactgcccccgggggcccagcctaaggtggcctgtcctgctgagtgcagccccaggcctcagtcatgaggccatggaagtcagatgcagtcatggaagtcatggaagagagatgcaggctgtagaccaccctaagggttttttagagtcaagaaatttttgttttgttttccttttcatgtacttggtaaatttaaacaggctgacatcctgatttaaaacaaacaaacaaaaaataccagtaaggttttgtttaaagggtttctggctactccttaacaatcaaggttgttttaattataatgaaaagctacttacaaacaccaaactgttgagattttttaaaaattagaaatcattaagattggcaagttcatgggaaaaaagacctactgtgtgaaatttggaacaacttttatggaggataactggccatgagtttcaattgtttgaaaaatgtgctcactctttggttcagaaattctaccaccaagatatagtctggaggtaaaattatatatgcacatagatttgattaaacatgttaatcacagcctgacatgtgactgcaaataaatggtaacagttgtatgtccagtaacggaagtgctgactatcgtatgagatgagatggaataccatgcggccattctacattcttccatgatgcagaagaatattgcaggtcgatgtggtatcaatgaaacaggcacatgtttcagaagaacatcaacaggattacatgatatacattatgtataaattgctgcataaattatgactacctgtgcatgcatctctatatacacacacttatgccacatgtataaatatatatttatgtttttattatatattttatatacattatgtatatatgtatgcatgtgcacacacacacacgttttaaaagtagatgggggccaggcgtagtggctcacgcctgtaatcccaacactttgggaggccgaggcgggcagatcacctaaggtcagaagtttgagaccagcctgaccaacatggcgaaaccccatctctactaaaaatacaaaaattagccaggcatggtggcacacacctgtaaacccaggagaatgccttgaaccaggaggtggaggttgcagtgagccaagatcatgccattgcactccagtctgggcgacagagagagactctgtctcaaaaaaaaaaaaaaaaaagaaaagaaaagaaaattgatgggaatattatataccaaaatgttaacagcaattttctctaaatgatgaatctatgaataatttttatcagctttatttttttttaaagttctgctttactattaaaatctgaaaagaaaaaaagagcactttaagagtgatctcttcattatcttcaatggctctgaaaaacaaaaaacgtggtgggtaagaaagtcagacaacatggctaaatattccccaacaaattcgtaccctttctttccgagatctttcattattttgagtggtgatattgcttcctaagagattatgacacatcttacatgcatgagctgcattcatttcaaacctaagaaaagcagggtacctcagaccacagctaagctggatgtattaagtggcctgggatgtgtaataacatgcagacagatggagctaaagtctttcctgggcagagagctctatatcaacaaacgtcaaaaatgtgatatgggcagtctttgcctgtgtcctgggtcttcggctctattaaaaaaagaaaaaatattttaaatgcatatcattaaaggccacgggcagataatgtgcttccctagaacaccagcccaaggactcatgtgtggctgtcatgaagtcttcaagaaagctccctttctgatagaaatgataacgttttgaaatcaaatcaaacacacacacacacacatgcatacaagatccatgcaaacaacacaagaggcctcggttattatttttgaattaccttgtgtatgagtcagctcctgttcttggttggaagcagaaataactgaacttgtctgactttagcagaaagggcttcactgaaaggttactgaagaaagcacagaatgactgggaagtttttgacaactgcagtgtgcaggaaagagctagctgcctgacagtgccagagtctcacatctcttcaggaaggcctaactgacccttggccagctcctgaaaacttggccctgcaatattccctgcgctgctaattaataaggttgttttgtacacccggggtcctgacacatgctgcccaagcttatctagttggttcgtaccaagtcaatagcatgatttacggtggtcacgtttcctcctggaaataggtgcctgtgtgaccagctcctgataaaagctctagcctctgagacccaagctgccctccctgggcttagacacttggcttacatcactgaagttcattgctggaggagtgagtgtgtcttgcgcaaatccacaggaagactttggaggccactgctgggtctcctctagacactgcctggtgcatttgttttccttgctgatgccactgcgtgttttttcactgtaatgaaccatagtcctgagtctccctgagccctgtgagcccttctagtgagtcacggaacttaagaatggttattggccgggcgcggtggctcacgcctgtaatcccagcactttgggaggccgaggcgagcggatcacgaggtcaggagatcgagacaatcccggctaaaacggtgaaacaccgactctactaaaaatacaaaaaattagccgggcgtagtggcgggcgcctgtagtcccagctacttgggaggctgaggcaggagagtggcgtgaacccgggaggcggagcttgcagtgagccgagatcccgccactgcactccagcctgggcgacagagcaagactccgtctcaaaaaaaaaaaaaaaaagaatggttatgagacaccagaaatagactctaagacagccaggcagaagccaacacccagaacaaaggccaggcacagaaccagtcttttttttttttttttttttttaagacggagtcttgctcagttgcccaggctggagtgcagtggtgcaatctcggctcactgcaagctccccctcccaggttcacgccattctcctgcctcagcctcctgagtagctgggactacaggcgcccgccaccacgctcggctaatttttttgtatttttagtagagacggggtttcaccatgttagccaggatggtctcgatctcctgacctcgtgatccacccgcctcggcctcccgaagtgctgggattacaggcgtgagccaccgcgcccggcccagaatgagtcttgagtaaatgttgctgctgccatcacagaacaccagaggccacaatctaccccctcccagctccttctaggacccgagcaggacactggagatccactggctcccaggtactgtaactgagactagggtttctcaagcttggcgctgtagacatttggagtcagacaattgtttttcgtgggaacattctatgcatcatagtatgcgtaagcagcacccctggtccttgcacactaaatgccagcagctccctcccagtcgttatggttgaaactgtctgctgacattgccatatgacttctggggtcaaacttgtgctcagttgaggagcactgacttagaagaagctaggtcaggtgtccatagagtagctacaagcacatctagaaatagagactctgctgactcagattctgcaacttcttccttcccaccaaaattcctactgcagagcaatgccagacagaggacgggtgttccaacgcgaagcaggcaaaacaccggcacccacccactttgcaacacacttggggcttttgtcaatatggctgcctgggtgaaggtgaagcctcacgaaccataggaattgtcaggtctgctttctaaggagaactttattcactgacattctggctcctgaattaagagctgtgcgggactgattaaaaaggtgtcattgtattaagaaatgaaagcctcgtgtttcaataagcatctctgataagaagaaaattgctagttagtacacatgaaatcaacaggctgcttgatgcctatcgaaatgtgtgctccgttttcagaaaatccaaacgaagaaggaataaatacattttaaaatgttactgggtaaaatccactgatgagctctccgtggtctttgcctttatggaacttccacatgacatcctctaaagggggagggcaggaggggtgcttgttgccgtggcagcaggtgcggtgtggggaatggtctctagcgctgcatggcagcgctgtcctcacagcagctgccaccctgctttcaccctgatggcctgggaggcggagtttcatgagagagaagcatgaatctgcatccagaacatctgggtttattaggcctaggatttttctgcacatttgtgctttgtcaaataatataataagttcctaaaagtcagagggtagatataaattaattgaaacaggagagcacaacccaaaacatgcttttacagagaactctgagaaaaaaaaaaaagtggagaaacaaaagaggctctccaagcttccagactgtgagctagcgcagagacaatgatcagagagattgactgggagaatggagaggtggcagctggtcagtttgctgcatcgccgccccccagtcctcattcctccttcttatagcaatcacagggcacttggctgcagaactcaggcaggagcagcgcctggaggtggaagggacaacatggcagaaactcaagtgtctaccaagacccaggaagaaggggagagactttgcagctcctggcatgacaggcctcgcaatctgtcctgcctctacctcagaattactcgaaataggctgaagcaagcagtatgccacttaaacccaccgggtaaaaggaaagctcaaatataaagataagcaattttaaaaaaaacaaaagcaacaccattaaagtgaggcatacacatttaaaaaaagtagagtaaatagcatctcatgaagtggggttaatataacaaaaggaagtaaactttaagtgaagtatagcattctgagatgaatgtcagaggatccttctcccatgaaactataccagatttattataatatgtgatatttctaaaataagaataaaatatacacatttaataatatttataaaacaattattgttgacttaattggaatatttttgatgattacattattttgaatttaattactaaggaacattcctccagctagacagattcaaaaagattaatatgttggggtaatagtttttcaacaaaatataatttacctattgttacgcagttcatatttctccattttgttcacaagcatgaaataaaatatatctattcaactattctaatataaaattaagttaattcatgaaaaagaaaggaaatgggtccctttacattattcattcttagtgaatccactctggcttgagttgattactgctttaatatctatgtattaaggtactacaaaataatctgttctaggagtttgtttcgccattgcatccacaggcattgtaaatacgccgatcgatactttctagacttaatgaattcatatttttggaaagatagaatttgaattggaaagcttttgaaagagagcccagtcaaaagatttgaacagacacttgaacagagaagattttaagcatgtaaagaaaaaaaaaaaagctcaacatattagtaattaaggtaatatcatttaaaccgtatgagataacactatgaaatctagtagaatggcaagaaaggaggaaaggaagaaaaaaggaaaaagagaaaaagaaggaaaagaaaaagaaagagagagagaaagagagagaaaaaagaaaaagaaagaaagagagagagaaagagagagaaaaaagaaaaagaaagaaagagagaaagagaaaaaagaaagagagagaaagagagagaaaaaagaaaaagaaagaaagagagagagaaagagagagaaaaaagaaaaagaaagaaagagagagagaaagagagagaaaaaagaaaaagaaagaaagagagaaagagagagaaaaaagaaaaagaaagaaagagagagaaagagagagaaaaaagaaaaagaaagaaagagagaaagagagagaaaaaagaaaaagaaagagagagagaaagagagagaaaaaagaaaaagaaagaaagagaaagagagagaaaaaagaaaaagaaagaaagaaagaaagagaaagaaagaaagaaaggagggagggagggagagaagagggagggggaagggagggaaaggaaaggaaaagaaaggaaggaaggaaaaagggaagggaagggagagagagggagggaggggaggaaggcaagcaggcaggcaggcaggcaggcaataccaaataatggtgagaatataatggaaaaaaagaaaagaaaaaagaagattgagtaagggagggaggcaggcaataccaaatgatggtgagaatatgatggaacaactggaactctcatatactgctagtgagaattccaaatagattagctattttggaaaacagtttgacagctttttatagaattaaacacgtatttatcatccaattcagaaacactacactgtgttcatataaaaaatctgtaaatgaacgtttctactggttgtattcatgatgtcccatcactaaaaacaacccaacaacctccctttcagtaggtgagacaataaaccgggttccatttatacaagggaatacgactcagcgtgcactgatgcgtgtgacgacattgatggatctcagatgcattataagtgaaagaagccagactcaaaagtttgcatttctaggattccattgatatgacattctagaaaaagcaaaatatagagacagaaatcacaacagtggttactaaagttgggagaccagggataaaaatgacaaaaaaggggcaccaggaaagtttgggtgtcccacagaaacattatctgattgtagtgtgactctaagcatatgttcaaaagaagaaatacacattaaaaataaattttattacatgtaaattatatctttataactacaaaaaaacaaacaaaaaaactaccgtgggataagtggagcccgagatttgagatgagctcataaagagtgatttggggtgctctcctcataccaggcattctcgtgaactcctctccacattgtgtctttgggtttcatgactactatcacatgaggtgagatttcattctgaggcaaacagcaagaaaacggacattttaggaaagtataaattcccagtgacctgactggagaggcttgaggatcactggttcaaagctccagtgtacaaagcaatgctgactggatgccctttgcagccaggccaggccatggctgctaagcaccctctgacttctgcttggggaccagatgggatggcacccagagaagagtgctgtttgccaaagtcatatagtgctttcaggacatggttccaccagacccaggtgtccccgttcctctcttagggagccacccattcatctatatctcaattttgcaccaaggggagttcgtaaatttatttagaggccatgtacagagatggccccaaatggcaaatccaattgagctgttaagaattgctgtttttgagagtccaatgtacaaagggatggatcaagatgaaaatgtgaactggcactgaatgaggtcatggaaaagaaagaaagaaagagagagagagaagggagggagggaggggggaggggaaggaaaggaaggaagaaaaaagaaaggaaggaaggaaagaaaggagggaggggaaaaaagagagagagagaataaaagataaaattcaaagtaggaaaaccactttttacatcaactaccaccacgatgacaaaatttctagaaaagacaaaagacttttaaatactcagttgatgcattgctattttaggtcatgtttccttttcacttaccagaatattactggaagcccacaattatcacctgcctcctattttcttaccccttgaccttcacctgacccctgaagtcaacgtactttcctgactttaaagacaaaaagaaaaggatttgagtgtccgccccactgttggaggtgtacaaaaaaaggtgtgcttcaatgggaagcgccacaatttctagactctagaggttatcacattctaagttttcattgtctttgagctattttacaaacctatagtctgtaggtaactaatgaacaccataaattccacctgtcataggggtttaattggtttccctccccaccgacaccattcccatggaaaaaccagttttgactccatttgcatattcatttcactattactgacaaataaatgttggttttgatccccatttcaactgtttataatgttttcctagctccctcactgaatgaggtaaataaaatctttaatgcatgttcatttgtacatctgcaggaggtatagcctgcccgaataccagcacgaggggtctagttggaaagctggattggacagctcctctgtgcagcccacacttgaccacagtcagcacttttggcctgagaccaaaagtggagcaaactcagctctgtcttcccagtcgtgctttccactgagctggctccgagtctgcccccaggaaatacctgtttagagttaaaagcacttaacactgatttgtatgtacatgatacaaaaaaaaaaaaaatcagcattaaaggttataatgtgctcattctttgtcatataattggacctaataaacaaacatcacattagttacctagtaaatttcaacttattactaaattagtagctatcctcacatacatcaaatattgtcaacactttcctggaagctgccgctacccacaaattgagccaattaaataattaattgaagtaaaatgactcctgtccagcagaatggatgtgagatgtgtttactcgttcaatcaaatccttccttttccagaatgcatcattttcaaagaaggagatctgaagcggggccctggctgactcattgaagactgcataaaatattttgaagctattcagaaaaaaaaaaacacattaaaaacaactttcatactggaggttaagaggcagaaatctttatagagcaaagttcctttgttttgtatgctatttcctgagtgcagtgaacttattaagcactttgatgtagcaaaaattgtgatgtgtatatgtacaaatgatccaaacacagcaaaaagcagctaaaaaaatcaataaagcagctttttaacaaatgcattccaaactggatcaaagagatagcctggcagctacatgctactgatctaacactcattacattttcatttcaaggaaacatcttttgcaacagaaaggtgaagtctatctgtaatgagcttcttctaaggcaggaggaaagcttcttttcaaataggaactaaataaatatggggcctgtgtgggtctctgcaaacaaatctgtgcagaagggctcacctttgaaagaaaggcctctacaaattcaaagagggagcttttcattgatttttccatcttcctcactgtccttccccagaatagactttcatatgtaaatatgtggtcaagagaaaacacttgcctacggatagtggtgtttttgttttgttttgttctttaagggatagtcactgggaactggatgctgtaaaagcttacccatatctgatttgataatgatattcaccattgattttatagcccaagggaggggcccctttcagaatgtttccaggcacacaagatttttttcagtgagttcactcagaaggttggtttgtctttcagtcttcatatggcgataagtcttgaggatggttttttttgccctgtgttctgatcatatacacccattccaggttatcttacccagggcttcctgcctaacagggacattcttgcctctcacagaatgttgtatcaatcagatttttgtgccgattctcattttgcccctcagcctctacacatctcattttcccattttactaacatgcaaactcatcattgcctgtatcactgggttaaaataaaataaaacataactgactctcaattaccttctggaaatatgacagaaggaggaaatagatgaaaaaagctcagagacagaaagatctttttttaaacttttttttaagaactgcctcatgcaaacatctacctagaataaaatgtcaccagcactgctgtaagatcggattgaaaaaagagtaagactttccatgttttggccaggcccttagaacagaggcagggattaccaaagtaggaaaacagagcagcctcatctccaagtggggtgagaggcacctggacagcctgaccatgtgaatgatgcttgggagcagggtctcctggaatgcagaacattctcccaaagaaaagaaggaaggctggcaggacatgaaagccaatacccagcacttttgagttcctaaataacctaccagaagggctaagaaaattgtgtatagaagtcaggccaaaaaagaaaaaagaaatattagattaggaaagaagaaacctttgtgtgcatacacatccaaaagcacatccacacaaacacacactcatcactccaaccttccaagcacctgcaaattgggaaatatctccaatacattttgaaagaaatgaggtgtaagtaattgaatgataatctaaatagcatattcataccagttattttataacataaagaaaattctttgattatataaagtgagcttttataatctaagagtatatttattatgttagttgctgtgttgacataaataggtattatacaaatatattctcaccataaaaaaggcaaatagtatatacattttgaagttaaataaatgtttagtttaaatcattattatttaggtgtccaaatgtgaaaataatgaacatttatgaacaatttctgaaacaggaatgagtaacctgaaaaaatgagagatgttgatgaagttcaattgatattcaactcaaaacaaaattaatataagagtaagaaaccacagagatatacatggagactaactgtccacattttccaaaagaaaatgaaagatcttggggaataagagaaaaacattatacaaagatgcattataatgtataatacagtaatacttaaattctccagaaaccagctatccggcactttcctctatggaagagtcgctcaacaaaggcccaccatcctgtgtctaggagtctcctttttcactccctgagatgagattctatgtttctcatctctggcttccctcctaacagctctctcagtgccttctccagccttttctggagtgcaagccctcatcctaaacttgctcagttagaatctctctctaccctgcacccaccccaatcacccactcaaggcggatcctgctgcaggagctggaaagcccccaccctgtggccttctcaaggatgtcattacgtctgttcttttatctttcttgtatctgcaccacgacagcttattctctattggatcactgtactcactgggcaaacatgctctactgtatctcatctttacaaaaaacacataaacaaataacaacaacaaaacaaaattccctttagctggcattctcctttactactgctccattttcctctcaattttccccacacaatcttcctcacctcttcctcctctcgggaaatgggaaaccctattcacctatgtctagcaggctctttttgaaattaagtacatgtttattaatagtttaaatctttattatttaggtgtctaaatttgaaaaaatatggactttacacaatttctgatagatgaatgagtaaccagaaaaaaatgagagatgtttatggaattcaacagatacagaacccaaaataaaattaatataagaccgattcctgatttttaggagggaaggcagagttgggaaatgccaaatcgcatcacagggagtggacagaggagtgttgcgcaacccaggaatattcttgattttaccatcttcctgcctcatccctgccctcagcccatgtcaacacacccatcagcaggtcctactcctgctatctgaaaatgtatctcacatctctccacttacctctacttccatttgaggtcaccatcatcccttatgtagacacctgaaataacccccatctgatctctctgcacccatactttcccctctacaacgtactccccatctctagtagcaagtgtgatcttcttcacccacccactgtgtcaaaccctatgttatactccttcttagaactctttggtgactttccattgaacttagaatcaaatcaaaatgctctccattgcctcccagcctctggtgatctgaatcatgtctctagtcaacctcatcttctttttagtttcacttggctccagccatgctgtctttttgcattcctctttgacaccacttatgtggctcgttctttcccattctattgtacatagagagaccttcctgcttccctaatctaaaatagaatataagcttcttaaaggcagagggttcattgctaccaagttttccattgtatttccaaagcatcaatcacatagtggatggtaagtacatatttgctgctaaaatggcgaagaatcaggagaacagaagaaataaaacttctcaatggggtcaaaacaagtagtacaaagcgaatgctataaaacttgaaaacttgattcataagaaagcatcttgagtttatggatcttttctttacgtatcaagaaaacaacaactaaaattaactgggaatctggtttccatatgctcagcctactaggaagggagaaagagctccagctgccccctcaagtaacagattctgactgagagatacaccgactgaggacagaagccatatctacttcatgagctttgtgtccctaacatctagtacactgcctctccataatagacagccacacgttagttgaatgaatggacaaataactctaataacctgtggcaaatagaagtgaatgcaaagaactaggagaggactgaaaaattgataacagatttaagttgggagatcacagtgatagctgagtggaccaaatcttaaaaattatgtagcattagaacttgtggaataggcaagaaaagctgtcaactctatgaaaaccacaagggcaaatccaactccttccacccccactatatgagtaaatatgttgtggaaagccttaacaattctgtgagtcttctctaaaatcacttgggattttaaaagctagtaattttctttaaatatgcaatttaaagactcaattacagcgagtacatgtttggattcttccttttctatatgcagtcaaccatacttaagtcaccttgaaatacaacaaaagcaaaacccttatttctaaggacaatccagtaatagcgatgactttacatatatctataagatgctgtaatttagccaacacttgcacttacttaaactcctttatcattcacagcacatctgttagtagatatactatctccatgattcagacgtgaaagctccgatttggagaagcacggggatttaagcatggttgcacagagaaatcgaaccattatttggattcagatttactaactttaaatcagctgtttcccaccacctaagcatgccataactactctttcccattcttggacagagtttttctgctgtgtttttgtcttctcttctaccctgctgggaagggtagaaggaaacttgaagacccccaaagttgtgtgtccgtgtatgtcaagaatgattcagatggtacatttgaccactttgtataccaccttgttgtgtatttagtgtggctcagtaaatcacacaaccccagcacaatgaaaccacaaataatttgtgtcttttgtctttgtagacagaaaagatcatccataaaatgagcaaatatattggaagcccaaccctcttttctgatccatacttcgatagcttaactgaattcagcagagtagcattattagagaagaaatgaatcctaacagttgggatcatgaaccctggagccaacttgcctttgtgaaagcctggctcccccacttaccagatgagagaactttgacaaatgattgaacctctacaagcctcaactgcacttctacaaattactgtacctctacaggcctcttcttctataaaatggggataacagtagggttgtcatcagaataaactaagttaaaacagaggtcaaaccagctcactgtttgtttttgtaaataaatccgtattggaacacagccaagatcatttgtttatgtattgtctgtggccacttttgcactgcagtggcagagttatgtagtaataacctagatctcatggcccacaaaacctaaaatatctagtgtctgttactctacagaaaaagtttgttgactcttgagttaatagatgaaaaacatttagaatggtccatggtataagcacttgctatctatctatctatctatctatctatctatctatctatctatctatctatctatcttttcttgtgttttttgagacagggtcttgatctgtcacccaggctagagtgcagtggtgcgatctcagctcactgcaacctccgcctcctggggtcaagttatcctctcaactcagcctactgagtagctgcaactacaggcatgcaccaccatgtagctaatttttgtaatttttttggagagatggggtttgacatgttgcccaggttggtatcaaactcctggcctcaagcaatctgccggcctcggcctccctggccactgcacccagccctatatatctatctttttgtgtgtgtatgtgtgtgtagtatgtgtgtgtgtggtgtgtgtgtgtgtgtgtgtgtgtgtgtgtgtgtgtgtgtgtgatattacttactctatggcaagcacttaggatgtttactctacttcttgtcctataaaataatttagtctctactcttatgcagaggcccagagattgagagtcatgggtcaaaccatttgggattggacaagattatccttatacatttcttcgaaccctttaattctagaaaattcaaaaccaaattcaaacagaagtaatcaaatttactttggaagggttttgagtctcataaaaatgtgcaattgtgcatttgtatgtatagcctgtatatccagttaaacgatacccaaactcctcaggggaagattacatatctatcaaccattgaagccagaactggccgtgtcacttgtttttgccaatgaaacaagaggagaagtgaggaaggagttttaagagctagtttgagacttactgtgttctctttttctcagtgctcctgatatccaaaattccccagatgcagcatgctccctcagtgtggaaggtccatgagtaaggaccatgaaagtcacagctgagccaccagggcaaatggagtaagcaagaaattaatcagcctttgttgttcgaaggtgctgaaggttgttagcctaccacaacatagcctattctgattgatacagtgattgttcaatgtctgccctttgtccagagtataaaacttccatgagaaaaggagacaaatcatatttaatattaataatcatattcatatttactattggagacctggcatctactatagaacctgacatatacatacagattaataaaagaagttatctggtagcatgtgaatagttaatagaagaggtaaatgacaatatagacaacatagagatgttacaattactattaagtgctataaacaaagagggtgccctttatgacctagattccctgggaggcaaggagtaaatgctgatggatgtctaccatggagcccaacaggaagaggtgtggtggccaggaaagcagaagtgaaaaggaaagagaagggctgtataaacaattaattaagcaggaaagcacaaagtatgtctaatattagggaacggacacatttgacagaagcagaggcagagagttcatacagaggtgaggtgagaataaaatctacaggaaatgcatgcattgttggataaaacccgaatttgcaaacatttttgttgctttaaatggtgtatagtcaacacttaaaaatggctcaaattgtggattttatgttatgtatattttaccacaacaaaaatctctgtctccagggttcaagagattctcgtgcctcagccttctgagtagctgggattacaggtgcacgtgaccatgcccagctagtttttgtatttttagtaaagacagggtttcaccatgttggccaggctggtcttgaactcctgacctcaagtgattctccctcctcggcctcccagtgtgctgggattacaggcgtgagccactgcgcccagccaaagtaatatattctaaaaaaataaataaataaaagttcagtgttgatccatcacccacctggatttagggcagagagttactgttcactgagcattcggccttcactgtacttgtcagtgggggatataggaaaagtgcatgtagaccccatcagctttcctggaagcctggacacaaacaaaaacgctggagagagtctcagatgaacacggtagagtgtcacccaaaggtggacagatcattacaatgtaatttgatttttgagggagttgggggaagaaagaatgggctcagaggctatgaaacgaagtccccgcttgaagaattcaggtcaaggggccaaggagagaaagactctgggggttggagcatctgtcatcaatctggataataaaagtattatcattttataaattagataacatccactttctccctgtgcttttcagcagttatggccattaaggacaccatgttatgtagcagaaattgtgtatgccagcaatgaaccttctgtgcttacacattttggccaagtcacttcgtattatcttatacgtggcctctctgcatggctcagtggctcccctcctctgctccaccagcctgcagatcagctctgccacagtgcagctctatctgccccatgtcatttgtcttcttgttccttatttgactcttgccagcaaatctcaccgcttgataattgagccagctactgaactgctctagcagctcagattcctttccctagctgtcaccatcaggtccagtctttcactcccacatcttgcctcattcaaccacttttgttatttctttaaaataaaatgtgtctgaattctgggcatggttttgggtgggattctgggcttgcatgggtgattcaccgttttcctccagctgactcagagcacccctgcaacccaataagacttcccagtattgggtctactcttttgtcctgtccctcaggccccacagtcatggaattggtgagaaggaattaagacactgaaatcagtcatggaaacaatcactctgttcactccagcacatttaggtggtgttccatgtttactggaatgaatctggatgatagaatctcaggactgggagggccaaagaagtcatccattttatctctgtcccaaagtaggaagttatacagcaacacatctgatctctgtggggaacctcactccccatgaggcttcccagtcatatcaggagacatgggcttgtggtgcagaaggaaaaataaagggtgatggcaacagaggccatggctttgacactatcctcgccaccatgggcaagttcttcagactgtctgcatgttggtgctttcctagtaaaatgtgggtacaattctgacaaagtctgcctccctgcgctactgcacaggttctgtgagaaggtgcatttgaacagcacgcgtccacgcagttgaagagggcatccttttacagctctgagtttgcaagggtagtgccctgggcatggggcctccaaagagctatgctggcttccaaggctgctgaccaggtctatgctgaccccagtgctcaggggttcatgagcctgtcagaaataggagggcaaaataataaataaaactacccccaagacaaatccagctattgtagccaactgatagaatctgcctatacctggctttatgaatacttgtcattctgtaaataaaaaaatgaagaggtagagaaagtcgtttacaagaataaaaggaaattgggtggggggagggtgagaggacagttgttttatatatacatatgcatacacaaatgtattaaaagacacactactatcacacatatattggggagttgttctgctcacataataaagagctgttttacacacacactcagtaacgaggtaaaacatataaaggacacgacagttcctgggacacagtatgtgctccatagtaaatgctggttattatcattgttttcagtatatccaacactgagcccaaaataaaataacgtgttttgcttattggaataacaagatcacacgacagcactgaaattgcttagtcggaaaatgcaagaggtctcactcactcttcatccctaggccggtggctttcattccacgttgattgacaagcacctgtgcggtgcttttagaaagaccactacacttaactgtgctgcatccacaggaagcccagcgccactggaatggaaagatggacgtgaccatgtgcgaatcccttcaagaggctgtgggttccctttgcacactatgacaccaccgatactccatcactttaagcaccaacactcaatcatttccttaaggttttcatgggcatcacttttcctctttatttgtcctaagagaatttattctcagagattttgtaaaagagcatggcaggaacttaattatccatttcctggtaattttctacatccgttgttccatattgatttgctatttaaaaccccctttaggttgtttactgatgtcctcccagcctgtggttcttccctatttaatacatcatcaccagcgaacacaaatgctgggtgacagttactttcatcgattccaaccaatgtgatacttgggttttggaagcagagagtggcagtctgaaacgactttttctattgcatctggcacatggtcacgtgaaggaatgcacacaacgtataatcaaatggcggtggtcctgagaggaaggcggtgacttcacaagatctcacagcaagacccagttccacatctctctgcaagagcagggacccacagctcagataaaacaagatggctatactcttcgttcccaatatgtcctagaaattgctgttctcagtaaatagcatcttaataaatcaaataaactattagtaaaacaaaatatgtacaaatttaaaaagaaatatttgggacatcccacattaaagaatgtgttaacttcaatgtattcatttgaagcctgtgtatccacagccacgtacagtacgtgcacatggcgatttttctattttggcaataactgagtgagaagaaaggaggggttagctagacattgagaataagatggctgctcagatgggcctccgtcaggactgtaggctaagaactgtttgatggggatgcatggagtcaaaacgcaaatgcctggagtgaattttgagagcgtgttcaatggtgtaagatgcttggatgtgtgtaacttggaatgaaccatacacagaaaacacaaggttgtcttttcccaaagggaggcagtctcctattagattgggaagcctcccagggaatgatgcgccccagagatcccatgttgttgctgtataaggtggtcttctcccaaagggaggacacaaagggtttactatttcttattctcgacccaggaacatagcctaacaaatagaaagaaagagaaagcctagcagctatttattccttagtgggatatgctcctttatatcccaatataaaggaatctcaaagacacaacatataagtctctttattgaaagacgacttgatgaacggttaatggaggagtaaaagcacaagagttacatttaagaactttcaaaacacagaaagtttgaaaacaataagaggaaagatgtttcaggaatgagattcagaccagctctgtggcttttgttcctcttgttctgtccgtaatttttggtggcagcggttggcagtaggcatagagctggcatcagcctctgtctgcacacagagggactttgtgacggaaccgtgtttccccactcagctcttcactaccaaggcttctaccagcatgcagtggtactacactcccacttgtgcacttacggttctgtttgcctacaacactcttcctccaaagatttatccttttccctcatctcttcacatttctatggggacccacagctcagatgcaacacgatggccatacttttcattcccaatatgccctagaaattcctgttctctgtaatagtatcttaatacatcaaataagctatcagtaaaacaaaatatgtacaaatctaaaaagaaatatttgggacatcccaggttaaagaaatgtgtgaacttcagtgtattcatttgaagcctgtgtatctacaaggttgtcttcagcacaggcacgtggtgatttttccgttttggtaataactgagcgagaagaaagggtgtctttgcacccacgtccacctctcagaaaccttcaccaaccatcctgtttaaagcattaaacagcctcaacctactatcacccttccttgagttatttttctctacaacacttttcatcaaacatagcatgttacatgtttattttagtagttgtctgcctgctcccactggaatataagtttcacaaagataggaattttgtctctctaaaattttctgtagtcttccagcccctggaatagcaccaggtacagatgagttcttagtacttctgtgttaaatgaaagaatgacggcatctgggaacagcctgtagagaggtaggtcaccattcaaggaagaagggacacagagaggggacagacaaggcagaagaaagaagggaaatcccatcgacaggagagaaaggggaaaataaagaagagaaagcgaagacacacagcagacagcctggagggagggatgtcagcaggagggaaaaggacagggcagcagtaccaaatgctggtgtgcgggccagacactggagaccgctggatttcaaaactcagtgcctgctagggaacttcaagaaacacgtgtcagtaaatgatgcagctgcaaattgctaccgaggtaaagaaagatttagaaagtagagttaatgaaaataatctagttaagaaagaaagagagagggaggcaggcagtctggccagccagccttggcagcacaggcctggagagcaagcttgttactttagcagtgtatgccggtgtgtgcgtgggcaggtgtgtgtgcatgtgtgtgcatgtgtgtgtgtctgattcgtgactgtggattgagaatgtgtggacagttatttcaagtacacaagatctgcaccatgttttcttttataagcaaatgggagaaattaacactgaattaaaatgtggtgtgtattttagtttctctctgtatttcaattccaggaaataaattatcacaattttcacaacttcaattcatttagagcctttttagataaaaattttgtaatcgctcagaactgcacttccaagtcaaaagaattaatctaaatatgtgttgctgactcaaatagagaagagtaggaacaaagtaaactcctaaaaatttttcttaaggcattttaaaaaactaaaacaaatgaaaagccctataggacccaaacacgcaggcaaaatgaattctctgaagagaaaaatgcattttgttctaatattctcttaatagatttttttaaaaacgtgataagaagattgaaagaaacctgggtaactcgagatagattatgcaaatgctcatttcattttcctacttctgagtgaggcctgggcacagttttaaagctgcaagaccccagcactcgctatctctgctgcccagctggcgcgcacaaccaaaggattatgcataagatgcacgtggttcacggagccaagacatttatgcggagctcaaaggaatctggcatactgtggttctcgggggcttagaatgaagattttaaaaatacatttccatgattttcaccagcttatctcaaccaagaggttaaatattagagagagagggagagagagagaaagaaagagagggaagaaggaagggggtggttcactgcttctgcagccaggaatggaaataactttgattcttaggttatatttgatcatcaccaagtcctttcctcatctcctctctttccgaaaatgtgagattcgtatcagtgaatcttccataccaaattttactataaccattcctttttccagggtagtccctctaacatagaaaaatatgccttggcatcactcaggctcagaggaaggaaatgaacatactatgctatattttcattgtctccacttctatatctataaattaaatgacataacttgctaggaaaaaaaaaatgccacgctagtctgaggattttggccgggggtctcatgactttttttttttttttttcacaacatctcattcaacaaccactccatagcttgaggatatgctccctcaaaataaacgcacctgtcatcagtgttcccggatcagagacaggcagctaataaaaggttcatcaggaatggctgagaagccagggatccaagcggaatcaagcccagctttgtcatctcagcactatctctgtctgtggtgagttacagttccctgtatagaccaaagacaggaccccaaagagaggtaacccagaaaatctacctttgctagaatgtgaaaatatgaaaaacataaaggttgggtatttttcaaaaatagaaggaggcccttctcattcatatatatatatatatatataaatatataaatatatatataaatatatataaatataaatatatatataaatatatataaatataaatatatatataaatatatataaatataaatatatatatataaatataaatatatatataaatatatataaatataaatatatatatataaatatatataaatataaatatatatataaatatatataaatataaatatatataaaaatatatataaatataaatatatatataaatatatataaatataaatatatatataaatatatataaatataaatatatatataaatatataaatataaatatatatataaatatatacaaatatatataaatatatataaatatataaaaatatataaatatatataaatatataaatatatataaatatatacatatatacatatatataaatatatacatatataaatatatataaatatatacatatataaatatatatataaatatatataaatatatacatatataaatatatataaatatatatctatatatatatatataaatttttttctttttctgttttggagacagagtctcactctgtcagccaggctggagtgcaatggcatgatgttggctcactgcaacctttgtctcccaggttcaagcaattctcctgtctcagcctctcaagtagctgggactacaggtgcgcaccaccacgcctggctaatttttgtagttttacaaaaaaccccgtagagatggggtttcaccatattggtcaggcaggtcttgaactcctgacctcaggtgatccacccacctcgacctcccaaagtgctgggattacaggcatgagccaccatgcccggcccccattttatattgatagaattctcattttagatcctattaaaatgatatcagcattttaggcaaaagtagctatagttctatgagaacatcatagaacttagtctttcttaggtgaatctcagagataaaataacatactggaagaagaaataaaccacagctctatttgtcttaatctttgatttgtaataaacagaaacaatcaagggagattcttttttctgtatttgccctgctgtgtacgtcaggtgttgactacccatgtgtaatcctaaactttcaaatggaatttccctggtaacgagatggtaacataactgctaacagacccctgcatatcagtgaaccatgcataactttaacaaatgcaatgcaaagggtggtggtctgcatggattatttctatcaaaaatgaatttatgcattcaccattagaagcagatgcaagactatagcttaaaagcaaattagaattcaagctggatttgcaaacattccagtttaacatttggatagcaaaggaactcagagtttataaaatttaaatataagatagacagtcacaattctgtgcaagcagtcagggttaattcagatcgtttcctctgctcttgcattccctgatttcaagcacggcgaggctggggctgtaattacggaatgggtagtactcactgttcaccagttgtgtgtaagctttaaactaataactcagcaattacgagaaaaatgagcggtaattacacccattttactcgcggctagacagatgggacattttctcctcgttattggcaaactgtcaccacatttatttcatttttactgtttactatttgttgtgctttgattaagagtaattataggctaggaaaatatgaaaaacatgaatgttgggtatttttaaaaatagaaggaggcccttctccctgttttatattgatagaattctcattttagatcctattaaaatgatatcaacattctcaagatatttccaggcaggcttcagttctgtgacagcttttcagcaggggattcccatgtttgctcattatttgggtcgtcatagacccataaatatcctgcattttttttttttttacagcagcctctgtgtccctcacactcgtccattttggtccattttggtccattttgtgtctgatgataaagcacaggagaaatccacccgtcgctgggatccacaggggagtaacgccaaaacacggcaccgctactgtcttcgcagcttttaggatgaggagcctatttctctcccatcactgtaaaataattttatgtatgttgtccagtagaacaatgatgttgagagttctttctacaatttgcctcagaagctttttagtatgtgacattagttttaagatcatgtgatacttagatactgacaaagtatgagcagtactgataacaccagtgggaaaaatagatttgaatttattttgtgcgctcatgtttgtagaaagtactattaatatttaattgatgtgggctagaaatttgaacgattttgaaagaaatgtgaataacaaatcagtacatatagaatgaacatacaatgagcacaagttttagttaatatttaaaatggtatctattttagagtgagcctccatgtgtaaaataatgtacaatttgtatggttcttcgtgatgctttgtgtatgtgtatgtgtgtgcatgtgtgtgtgtgtgtgtgtgtcatgattagctaggctgtggttccaaattctaaacccttaaagttacagccccaggagaaataaaagccatcacaattcacaactggcctgcattgaagcatgattttgcaaacaaaaatgctttttccctccataaaagtcatacttgaaaatatctgagaagttatttttggcatcagtttttcttaatgggaggagaaaaaaacccatgccttgttctacacgggctccatatcgattcatggaagtgccatgtgttaagcaccgacttgctaatagtgctgcctgtgtggtgatctgctgagctagcgccatgcacagaattgattagttcccttaatgagctttagattgtgcttctaccagaataaggacgcaaagcaggggaaagtgtgcatctggagaaaacccacctcaaagcagctgcagagaggaaaatcaagagaagtggcagagaggaaaatcaagagaagtggcagaaaactatgggaaggtgggacttgaggggagacctggagacaaggccaccttttctttttcagaagatgctgcagcttgctccatccctgactttctccccagcggagggagaacagggcagggtgatgtgcaaacctcagtccccagcaatgaccatgtgcagcatggaaaactggggtcccctcttgtctctgcccttaccatgtgggtaaccctaacacccctccctgatccgcagcttcctgtaaacgaggggaagagacggaggatgcagccatctgtgtcttcatttgtgtgcaactgcattatgaaattttaactaaaaatgttccagagaaagcaaacagtgtaaagctattaaggaaggcggtttagctaatggataaccgatgactgatgtgtgtataagtgagagatggggatggagattctgggatgctggcggaggctctgggagcgcaggtaaacaggcccaagagatgtggagagcagaggttgtcacagacacatgccatctgcatagggctcaatctgccgttagtaatttggataagtatccaaagtttacagagaaaggaagaaggcagaaaaggaactacagaatcaaacagctcccctttcctctctgccacactcacaccccacacacacaaaaacaccacacgcacacacacaccaggggacaatgagatgtcagataagcctcagaacttctacggtgttttacacagtacgtgaaagcaatttaggaaattattcctactttcggaaagaaatataaacagacaacattatctagtctattgtgttcatgttgaaagagaacaactgcataagagccctactgtttgtgtaaaaagaaactgtcttcatgtaaaataaccaaacctagtaatacataggagaacgatgctgcatggaattttacatatgtaactcagcgtttattttgcctcttgcctttagtaaatatgcaagggtttttctaatgagataaacagagcgcatggcagtgtggataagatgcacagagcaagctgctctagaatgttggtggccccatgggtgtggtctgggtggtggacgtttaaatctacctcacggaagcagctagatgagtgttatacaaggaaacggggcgagagaaaacagacatgagctggtttccactaattgtaggaaaaggtatcttgattaagtattcaggatgctttctctttctctagaagctcaaaagaagccttttgtttcctgtagcaatgcccatttgccagatcacatttaagtcaagcagacggttatttgagtgaaaacaaaccaatttgcttttgctggttccagttctttcttttggtcacaggctttcaaaagaagctttcttttctccttctcttaaatatgtaacacaagagattcaacatgattgaaaatatctagaagagaagttctagaatatcctaatcttaaggcttggattttcagataagaatttatttgactcctatttggtggatttatttactctgacatggagagccttactacacactgataaaagccaagttaatatgtatttcaaagtttacactcatcatgcctgtaatcccagcactacggggaggccgaggcgggtggatcacgaggtcaggagttcgagaccaccctggccaacatggtgaaaccccgtctctactaaaaatacaaaaattagctgggcatggtggccagtgcctgtaatcccagctactcggtagaccgaggcaggagaattgtttgaacccgggaggcagaggttccagtgagctgagattgcgccattgcactctgcctgggtgacagagactctgtctcaaaaaaaaaaaaaaaaacaaagattatattcatgtattcctgttgtggattgggatgggaaaatcaaggctcagagagggtaaatatttgtccagggtgatacatcttgtactggcacagctgggccctggctgttggactccacagccctgaaggaacacagagatgaagacttcaatactggtgttcctcatgatgcaggcttccctggtgaagaggggcaggtgctagtctaaagaatgaagaaacactggaggcggagagcacagcagggtgacatggctggaacagaggcacgataagtatgtatccagcacaagcaagagggagcagctgatctaggtcatagttaaaagcacccattaggagtactgagaaattacaccggaaagagccatggtttagaactagaatcacctggagagcttccaaaaagagaaatttttctgcccccagttacaggagtttttggttccagaggtgaggaatgaagtccagggatctgcctcttcacaagctctcctgtaattctattttcatttttttaaaaatgattttgagacaaggtcttgctctttcatccaggcttgagtgcagtggtgtgatttcaactcactgcaaccttcacctcccaggctcaagccatcctcccaccctagccacccaaagtagctgggaccacaggtgcttgccaccatgcccagctaatttttattttatttttttagtagagttgggggttctgccatgttgcccaggctggtcttgaactcctgagttcaagcaattggctcaccttggcctctcaaagattacagcctcctgtgattctgatgtgtgatgagaatgagaatcaccagggcagagggcctcccaggagacccagtgatgggctctgtatttgctttgataagagcatagagcctggactcagggctctgggatacataggctggggctgctgtgtgtttcaggctcctggcacctgctgcagtctctggagtgaactaaaactgttttctattagagggatgagtggcggggtgggtagatgaagagacactagagattaatatgataaaattccagagtgcagctcagatatgtaggaataagatctgtctgatggctactgcctgtaaatacacaatgtttttcctactgtcttgaactgagtaagacagattgatatctcatctctaagtcacatttgggtggccttcaggaaggggcctgacttcttcttgttttattttctctagcttggagaaacaacatattttacaagtgagcaacctgtttgagaacagaaattttgcaaacatcagagggtcatggtgaaattattgtagaaaactttggtttaaattcagtttcgcgagctgctcaggaggacttcagagccttaactgtgcactgagaagctctcaggggagaaactacctccacaggtcacccaccaatttcagagtggactgcaaagctctggcttgagatggcagaggttcaactaatttgggatgccggccaagagtggactcttttgctttgctgttggctgaatggtgtctcaccaacaaaattcatatattgaagccctcagtcccagtagaatcagatttgtagacagagtcttcaagttagaatgaggctgttaaagtgagccctaatccaatgactggtgtcctcataagaaggttggccacacacagagataccagggatgtgtgcacagaggaaacaccatgtgagcacacaatgagtatgcagctacctgcaagccaaggagaggccaaacttgccaacacttagtcttggacttccagcctccagaatgtgtgaaaatacatttatgttgtttttgttacccagtctgtggattttgttacggcagcctgaacagactaatccatgcttcattccatccacatttgttcaattgagaccagcaggctcaccatgcataaaaaccatggcagatcttgttaaactcccaacttcccaagccccagcccagacattctaattcagttggtccaagactgagattcagaatgtgggtgacttcagaactccgcctagagaaacagatttcacagcttggcagagtgagcaaagccagcacacagcaggtgcttaataaatgctttctgaatggatgggttaatggatgaacacgctctttcaaataaaagagtacaaagccaaactcagataactttatgacatttctcacttcagcaagcagtgtttggtgagtcaagtggtttatctgtagttgggaccctcatcagagtgagtgaaaatagaaaatggatagctaaccaatggtgaggcaggagaatagggtttagggtaaccaagggttaaggcataagcaagaaaacagcaggttcggccagttctaggaaagattagcacacaggccatgccctcactcctgtgatggcaaaacagtagtttccacctcagcctctggtccactgtgggccaagtcttcacttcagcctctgattggtggtgggccaatctttcatagggtgtgactaactggaggcctcgaaagggcacctaggggtgttaccaaattcttttagcttaatagaaaccctaaagaacattgcattcggggctcttgagctgcttgcttgagcctgctcccactctgtagagtgtactttcacttcagtaaagctggacttttgttacttcgttcattgcttcattccttgttgcattttttgtggattttgtttagttctttgctcaatgcaccaagaacctggacaactcacagtcaaaacgttccatccctaaaatctgaggagatatatagtcattcttctttttaaaacagtttcaaaatacaactgccaaattttaaaaattgttttcaagttactaaagccaagcactcatacccttctaccaaattttgcaagtaaagattcaagaaaaaaacacttcattttattccagcttcaggttttggccacagaagcatacacataccgggggctgccaatctaggacactttcctagcacagcctagaaagagcatgatgggctcttttgagaataattaacgtactctcttcttgcatcctttctccctaatatttcctttcccttccttctgtggtggttgtttgatgtcctgaaagccacagcaattaaagaaaatgttcttgagcatagaaataacaatcagccctgtttcttacagttttgatgattgagtatgctacacaggcatccgaaaccacagagatgcaataactgaatgtaaagtatccgataaagagcagtataaatcatgaaccaagagtaaaaatgttttattagagatgatgatacataaagatgaaattcagctggactgtagaaggctgttaattgaattagggtaaaatagtgaaaattggaactgatccatatttgtggaatcatgtgatgctttaattcagttttttttttagtaggcatccactatttagtaaagacttataactataagtagtatgagaagaataggtaggacgattcctaaatctcatagcaatcaggcaggcatacacggtgcccctcttcatgttttatgttagaaatgcacaatccaattctctatctgaggtaaatactcctgtaattcacaaaacactgtgatgtgttttgatgatattaggtcatgggtctaaaaaatcaagtggttattatacaattattttaccatattcacttctaaattcatttcaatttagaaaaatggaaaaattgagcaaaaagtattttgttgtgtccagggaatattccaaaacaataaattatttaaactgtcttgggacatcaaaaatatttcctctataaaatacaatgggtgcagagtgaaaaacaatacaagtattagaaccttagagcctttagcctataaaattaactgcactaaatgaaaagataccgttcttggaggcggtggaggagataaagtaccaccatgaagtttgagccgatgaagggagcaggctgtgaaactaggattgaaaagaaagacacagggtggaacataaggcctagaaattaatcctgaaaatcactaaaagaagtggctcctggctgcaatcctagcactttgggaggccaaggcaggtggatcatgagatcaagagatcgagaccatcctggccaacatggtgaaaccctgtctttactaaaaatacaaaaattagctgggtgtggtggcatgcacctgtagtctcaactacttgggaggctgaggcaggaggcttgaccccaggaggtggaggttgcagtgagctgagagcttgccattgcactccagcctgggcaacagagtgagagactctgtcaaaaaaaaaaaaaaaaaaggggggctgttcacctgataccatgagcactgatttcttgttagcaaagagaactcacgtggcattgactgatctggagtccatcgtgttgcccaccaaacttcctacaaacttagtttctgttctctagacatatcctagcttttcttccttggatgaaatatttagagatgacagaaataatgacttccaacatgaagcatgtaaaagcgaagagtggctggcagaaaggattgcaggagaaaatggaacacaaaattaacatattaagtagaaagctggtgtgcagttgaatttcagtgaggctgactggccttgctcagctgccagggaacactctcgactcttgtttccaatctcttccaggccctccaggggccctggaccatctcttgggtcccatcacagctgagagcctccatgccctgcatgcatgaatgcatccacttgcacacacagctcgggaccagtctccaagggtttctgccaatattctcttctaaagtttcgctttgctctctgccatcactctatactttcttgccaagaatttataacatcataaagacacaaagttgttcaaattttgctctgggattttgaaggaggaaaaattcaagccacaaatatgcatggggctatgcaaatttatcactgtgagaacaagtttttcagtcctattatcatcactttattggtggccgaattggaggagttgttaaagttcagaagaccagcattcaccacacgctgttattaggatgtctacactaatcatagcttacaaaggccaatcgatttgctctgaaattataacagcaacaatctttgccttagttcctgtgtgggtgagcactgtttgtatatttatatccttatttctggaacattaaaaactcttctgtaatatatttttccatcagatatagttgagaaaataattataaatagcccattaaatgttatgaaacaataaaaaatctgattaaacatcaatcccagactaagaatataatgtaagatttgatgaattatggctaattttatgccagtttttatggttattaaataagtttaatggaccactcgaaattccattacataaatcatagtccaaagtcaggttctcttgtctaaaatagcaaaatttctagtgataggacaaaaatttaatagtgctagcacagttataagacaaaatctttggtgtagttaggataaaaactatatattatttgagaaattatgtccattcaaaatattccttctagaactacataccttcaaacctcatcagataatagtagctaatagctatttttcatttcataatgcagaaaccctaggacctttcaacattaatacaaatgtggctgctttatataatgcctcacatctgcatgaaaaataagacacccaacagcatccagctgactctaaatgtccagatgctgggaatgattcacccatgtgtcttccacattgaatgtgccaaacagtgacgctgagtgggcaatgatgtgctgcatagggggagggagagatactgacatttgttagggaaataaaatgaattaacttggtgcatgcaacagcacatgcaccgagtagcaagaaaacaaataaatagagaaagaaagcagttgtagttcacatacttgcaaaatttggaaaagtaaaataaaagactcagtaactgaaaagattcaataactgctgtgctgcatgtatatctggggtgatactaaaataattcaacaacctgcacaaatacataaattagtaattaaaaactttcctctaatttcatacatatccctgtacacacacacacacacacacacacacacacactcacacactgctcagcaagtttctgaagctatagcattgtttacccaactgtcctgacacttctgattttaggaattgctagggtgatctctcgtttgggcagatgtcccaagctgacgtccgtggctgagctgttgatagtggcaggagacagacaaatccctaggcagacagtggtgggtccccattgaaacccaaccttcaagccgaagacagtttaaagcctagctataagtcctgggtacatccacagactggattgagaacctgtctttccattttggtgcacttttctctgattgatccccacccttcatctattttacatatacctatcctttcctaattagttttctacactgtcgtgcctttgagtggtgtcttcattttaaccttttttgcacactcataaaccaatcagcacacactctccattttgagtccataaaaagctccagacctagccacactgggagataaacaacccaactgaggggttgggggaccacccactgtatcccctctccactgatagctgttccatcactcaatacaattcttctctgcccatcctcacccttggaattgtcagtgtatcctcattcttcttggacacgggacaggagctcgggaactgccaaacatgggtacaagctataggacagcaagctcagcgggtgggggtgcctccaatggcaggcccggggctgagcaaggcccaggcagggggatatcgccagccatggaggtctcttgttggcaaagtggctgagaaaaattctgcatcactgtgatttagcctcacacactttattgacctcccattaagctaatagtcatcaggccagtgcactacatctggttacaaaagaaggtgtctgggctgggcatcacccagaagccagcacttttcagctagcttgaacttaaaagaccattgtcttggtcccaaccccaattcctcaaggttagcctcagcccccaccctgttgggttgtccctgccacctctggcccactccagagcagcaggaggcattgcacacatcccacctggaacctccacctctgtccacctccaagacagccccactcccaagaccacaccaccaccacagcctccatgggccaacgtcattagataatgcgtggtctcaagtaaactatttctgattaccaactactacagaagaatttaaaatatatatactttagcaacacattatgccacattgttttatgctggctggatacctattctggatacgcctctttatgtgctctgacaaagaaatcccaatgcaatgccctggcaatgagaacagtgacacacaaacaataatatgcaggggtggaaaaaaacatgccaaggtagttcacattaggggaggtctcagaagcgctttgagaggtgagtgtgccacagtgaggtcacaaaatagagatgttgtgcaggaaaggttcagttgagcccagctatgccagcaagcccagggcactgcaggccaggtagttgtctctctggattggatggcaccagctcctcttttcactatattttgtctcacctattctgtcagcagtgccttctgcaaggaaacttggagagagagagagacagagtagagtttgctccaggtacagacctggagattgcagaaggctggtggccttgagtctcacttccagggtgctccacactctctgtgagatgagcagcacagaggaggtcataaggctgtgaccgacaacaaagcttattgcaggggtgaaggagcaggggagaagtgagcaatcacttgcaattttaccaggtgctataaaatcactgacggggactttttttttctttttttaattgaactgcttcccaaggtcaaatgcccaaaacaaaaacctcttcatctggacaaggctttatttcatccaagcatctctaagcatttattccctatctgtcacattttgcatgatgtagaggcaacatttccacttatcattaactaagtggttagacaaggtagttatcaatttcacaagggtggaggtatttaggcaattttcatcaatgacattgtgatgggttaattttatgtgtcaacttgactgggttaagagatgcccagataactggttaaacattatttctgggtgtgtctgtgaaagtgttttcagaagagattaacatttgaatcagtgaactgagtaaagaagattgtcttcagccacgtgggctggcgtcgtccagttctttcagagcccggatagaacagaaaggcagaagaaggaggagtttttccactctcttttcttgagctgggacatctgtcttcattaataaagaagtggggaggctgggcactgtggctcacgcctgtaatcccagcactttgggaggccaaggcgggcggatcatgaggtcagtagttcaagaccagcctggccaatatgatgaaaccccatctctactaaaatacaaaaaattagccaggcgtggtggtgtgcgcctttagtcccagctactcaggaggctgaggcagaagaattggttgaacctgggaggcggaggttgcagagagctgagatcgcaccactgcactcaagcctgggcgacagagcaagactccatcataaacaaataaagaagaggggaaaggtggagcctggagagtgggtcaggcaggagcttggtttaggagttttcccagttctaggggagggttcctaaaggttgtccagctgtccagttcaaaatctggagtataacccatgatccgaggaaaagttgaggtctggcctgaaacactatggctaggattctggggcagctttgtgggtgcacagctgaagatttgcagctcaggtcattgcctcatgagctccaagcacacagaccaactccaggccctgtctcctggggtggagaagcatctaacacatggacggccttggctagatttgggttttgaatcacaatgtttaacaccgcaaggcttgagggtcttcaggcaaattactgagcacaactatgaaggcagccactaatagcagcaaaagtgtattcaatatttatatttcttatgagccatctacatggttcaaaagttagcacattcttccttaggctcctgcaggctttgacatacctttatgaactgctccaaggattgggaagtcttcattctcatttgcaaaccgtatatattctgaatacctgctcatatcccatctcgattatctcatcaataatttccatccctctgatttacacctgtaaaagcaactcacttgcttttcccaacctaaagagtgctgtggagtccctggagtagagctactgcaatttcgtcactctctgacctgttggaaactcagtttcaccgcagctttacaaggctgcagagtcttatatcttacatgcatattatagccaacactgttgactgattgctcaagaaatatcttggttttgttctgatggatatatactcagttttagggaatacattatgtttgctttaagtcaaatacaccaaaatcagtttcttctgccaggaattagtctaagtgggacccaacttcaatgagataaagacattttttaaaatctgttggtgacttctgggaaaggatttcctccttaataagggacaggcacaaaagaggtcagcccccccacctttttctctgctggccccacctgctgacctcagcactgttctctagggccatacttccccatttagttggtggcattcttttctcaggggaaaaggtaaaagattataaaggagtgagaaagtcaagttacttttagctggtgagaacacatggacacatggaggggaacaacacacactggggcctgttgaagggtgggggtggagggaaggagaggatcaggaagaatagctgatggatgtggggcttaatacctgggtcacggaatgatctgtgcggcaaaccaccgtggtacctgtttacctatgtaacaaacctgcacatcctgcacatgtgcccctgaagttaaaattaaggttggaaatttgaaaacaacaacaacaacaaaaaaaaaaaaaaacaacttctagctataagaatcctgctttgagcttcaaaagcctaatctctgtgtcatgtcatttagttgatgacatgaacaacagatgccaaaagctatgtgatcagccagaaccatttttttccacccagactgaataacgagcccatggctaacagcagagaagccctgagtcaaggacctatccacaggaggcacatccaatgggaggagacacagtggaaaccacacatggctttgggcttagctgagagcccagggaatctaggcctgtgtgcagtaaagggttaatcccacaggcttagggggtccaaatcccacacattctaaagaaagatcttgcccttgactgactcctaggaggtaacctctaagctgttgcaatttccagcctgataaaagtgtcattacagacctgaggcttggggccaggcaagattgtttatgccaacaattggattatgacgagtgtctgtttttattcttctgggaccctgggccacgctgtgtcagttgaacctctggaggaggggttggagactcaagtgttaaggtaagtcatctgagcactctatgtgactaacccctaatgaaaaccctggacaccaaggcttgtatgagctccctggttgatgatactctgtatgtgttgtcacaacttcttactggaagagttaagccctgtccctataggtctccgggaaagacaactggaagcctgtgcctggtctttcctggactccttcctatgcactttttcctttgctgattttaatctgtatcctttcactgtttcataaactataaccttaacaacaatagcttttcagagttctgtgagtctctccagcaaatcatcaacccaaggggtggtctcaggaaactccaacacagtccaacatttccacatgggttcctgttaacgacacggtcttggagcagtagaaaaaagatggctgctttgatgtgcccaggtggatggtcctacaacagcctaagagagttcctccacctctggagagggtggtccacagccaggcattttcagggtgtctcacaaggccatagatgttgttgaaagagccttttgtggagaggctttatattaatagttaaggacacaagaggccagaggcaatctgactcaatgatggaaacttggtagctgcagatgccggccgtgaattggtatcagtgatggaaagaaggccacaccctctctacttggtctgctgagatcctttagccccaggttagactcctaaacacagaggaaagcacccagacacagagtggagaagaccccgcgttgactgtgatcatcgtgaattaaatgaaattaagattctaccacctggcatcatgcagtatatgttacaaattaagttgaactatacaaaaatacaacttcaattctaaccatgccgtctttgtggattaaaactcatacctggccaggcgcagtggctcacgcctgtaatcccagcactttgggaggccaaggcaggcagatcatgaggtcaggagttcaagaccagcctgggcaacatggtgaaaccccatctctactaaaactataaaaactagccaggcattgtggcgggcacctgtaatcccagctactcgggaggctaagggaggagaattgcttgaacccaggaggcggaggttgcagtgagccgagaccacactattgcactccagcctgggtgacagattgagattccatctcaaaaagaaaaagaaaaaagaaaaaaagaaaaacctcacacccattacatacatgaaaaactgttagctttttaacccaatcaccaatacgatattactgtctggtaaaaatatttttgttttcctttaaaaatcatattggctatcagggaaatggacccaaatatgcagatggaagttgtttatcaagagcatagaaatggagctctaggttgagtcctagaagcatgctctctgctttctggtgctagtacaaaatcaatagcagtactttctcagcacctctttgatgtcagcacatggcacatgtgaagcaagaggctgttcgattttgattgttcactgcactaaatttttacagctgcggtaacaaatcactgcaaacctggtggcacaaaataacacaaatttgttacctcatgctttagagatcaaaatcctaaatggatctcactggactaaaatcaaggtgttggcaggactgtgctccttctgaaggctcgaggagaaagtgtgttttgtgttttccagctcttagaggccatccctgtttcttggttcatggctgcttcctccatcctcaaagtcagcagtgcctggcggagttttcctcacatctcatcatgctgaacttgactctcctgactctgactttcacttataatgacccttgaacaacaccgggcccatccaggtgattcatggtaatcacatctccagattcttaatcacatctgcaaaatcctttttgccatgtaaggtgaaatattcaccttccagaaattaggacacgcacatctttaggggccattactctgcctgccacacttactaagtaccagattttccaccaggggttaaggataccccctcagctgtggagatactctcagtctagacagggagatacgtctggaaatgcgtatttgtactaggtaatcactagctagcttagggagattccgaagcagccagagaaggagagagaaaatggagcctgctttcttgcagtgcacagtccacagcgtgccacactcatgcacccatcttgacagcaactagacatattaggattctgactctcttctctaccctgcttaaggaacctaaaatatcatgcttgtcttagtccacatgtgctgctataacaaaacacaagagaccaggtcatttagaaataacataaaattatttctctcagttctaaaggctgggaagtccaacatcaaggcacagacagatttggtgtctaggcaaggcttcctctctgcttctaaaatgtcaccctatagctgcacctttacatgggagaagggcaaaaggtgctattgtgctcccttcaatctgtctctcttttttttttttttgagacagggtctcactctgtcacccaggctggagcacagtggcacaatcacggctcattacagccttgacctcctgggatcaagccatcctaccacctcagcctcccaagtggctaggactacaggtgtgcaccaccatgtctggctaatttttttctttttttttaatttttgtagagacaggattttgccatgttgccaatactggtcatgaactcctggatgcaagtgatcctcctgctttgactttccaaagtgctatgattacaggcatgagccactattcaacctcttttttaagaccactaatccacctggcatggtaggtcatgcctataatcctagcactttgggaggccaaggtgaggggatcgcttgagtccaggagctccaggccagcgtggcagcatagcaagatcccatctctacgaaaaatacaaaaattagccaggtgtggtggtgcacacctgcagtcacagctacctgggaggctgaggctggaggattgcttagcccaggaggtggaggttgcagtgagccatgattgcaccactgcactccagcttgggtgacagagtgagacactgtctcaaaacaaaacaaaaataaagcactcatctcatccatggaagcagagtgctcatgatgtaatcatttccttagtggccccactgctcagtcctatcacattgggttttaggttccaccatatgaattttggggggacacatacattcaaaccagagcaactcttatttcattttgttctttctacccccttttgaaggctacattcaacctttcttaacgtttccattttattttcacacgcaaatgctgatgatctttagtttcctcaccagccccttcaaaatcctaatgtgaaaatgttcatcgctttttgcaaaccacacagccaagccctgttgtgcatgagtgaaagctgttgttgcttgcttcattaatagccacactgtcaaacaagctgtgtgtgttatttcttcactccatcctcaagttgacaagaaaaaagcttaaatgcactagaagatgcttcaatagaaaaaaaaaaaaaagttctgtctgcacaagtccggtatgttctcctctcttaaaagagcaagatggatcatttttgtgccttctccatcacgcttctgtgtcaccgttgcagaagcttccaccttaagacagtgaattgcaataataaaatgtctcttcctcgctgtctttgatggtggcaatgtaaaggctggagtttaattacatacaacatatggacaaaaattgtcatgcctactcatttcaggccaatggcgaggaaagcaagaaatagaaatcaagagaatcagctcagtttaagtaagagcatgatgctggagtgtatcttatcttatctcattttaaactaaaggagatcaaagttgagaatgttttcttttcttcactggacaaaaaatatgaaatgctaactgtgcatgaagcattgttccaccttaaccctttaatgcaagtatgggacttgaaccatagtatgtctatcaaaaatattttttaaaaatcaaaatctgtgctcaataaagatttttaaacttgttaaagtatttcagattccccattatagaaagttttgcatgtttgaaaggatgagccactgggcataagagtgagttgatgggtgtgatatttacactctctcctaggtggatatctttctggaccctaatggggtaggtaaggttgccttacatgaccttgtgtgtgttgaagcctagagaggcatgaacagtgtatattcatgggcaggcatactctgcctaatcttctatccccagaggttacttttgagctgacacaaggaatatatcaataattagcccttaagatgcaattctctgttggtctaattactcaggccattttcacaggcaataaaagcaaataaaccagggtacgactccttttaaaatgtaaaaggagtaaaaagcaacattagtgggctagttcaagtgcctttcaaactgcaagaaaaagaaaaagtgaaatggaccaattccagggctttattttcagctgagaacaggataccagagggctgcacagacacaggcgcagctacaccctttggtgacttaccctaaagcaatgtgaccactattttctggaaataaaattgacaggcagaaagaaatcttccacaacgcggcaatctgatcagggagtaccccgcaggagtacccatgctgaaatgatttctaaagtactggtggtacaaagtgatacatttctatttgttttgtgtatatacaagagaatttctggaaggttggataccgatgaataactattagtacctgagggtgggggaggcataccagggaatggagagtaagggactggagtgagactagaattttttctgtatgctttttgagttttgaattataaatgataacctgtttacaaaagtaaataaaataagaatgagccaaccagcaatctccaattcagaaatgctactttgtggaaagaaattggccaggtaaagtttcccttggatatcttttaagtgatattgaggtattaatagagctgagaattaacatttgtattgcagacacaggagtccaggaaaggtcccacagagaaccagggttccaagggatctcctgtcataagctgtcacaaagagattttaagatgaagcagcgccattttagttagaggctggctcattctgagattctgcagagacaaagaaaccaaacacagccaaagaaaacatatcaaaggcaattgcacaaatgtcacttcctgcctggtttacaaaattatcatttaatttctgaacctcagtgggtctgtgaagacactgaccttctagctttttgtcaagccctctggacaaatgtgcctctcaggctgcttctgtcatggcttaaaaattagctaataagtggtttgcacttcataagagtaaacaccatgttgaaactgagccaaactgacactctaataggtcacagtgagctgagaagaaatttcattgcaaatcctcaccatggggcgtcctgggaattctacaagaatcttcatattcatgaagcttaattatagcaaaattgccaatctgtaaaatatggctgcatttgcatacgacttacaagtctgaaacatgaacaagaagactacggtccccttgggatgcccacagtatgtgtagagaaacacaagtgaaagaaaattgatggggggagtgggggtaggaagaaaaataaaaacagatcaagaggtactttatttacctagaaaaatgaaaatgccaatcacagaaaggctcttattatgtacttgtaatcaaccataatattcaaattgctgaataaagaatcaaataaaatcataaatttaagacattagtcttaaaaatattactcattttagttcctgagatgaatggaaagttgcaaaggctgtgtgcacacctcatctgttctgataatcgggcaaatgaggcttcgtcttcaagcccctgcggtaatcaacttgagctcttaagtgcttctttggaagaggggaggcatcttgggataccaggattgcagggctcagcaacatacagacggacaaccatcagtaacgctgcccccacagatgtcaccaatgtgcctccaagggtcaaaaaaaatagtcgtgtttctaactatttgataaaaatggaggcaattaaactctgggaaggctatgatttcttagcaaaataaaaccttggccccatgcattcttcccttcctcctatagaaggattgtctggtgtactcctgttcacagcaaatgcagaatcccacactttaaaacatcctctgttcacacctgtttggtgatcagatgagtatctatctatctatctatctatctatctatctatctatcatctctctcatctctctatcactctagttatctatcatctctctcatatctattctgttttctgtttattatctatctactatccatctatctactatttatctattatctatctatctatcatctgtgttctatcagttatctgtccatctatgtatatgcctatctatttatctatgtatctatctttcatctatctgcctttctaccatctaattttcttctgcatatctaccaattatctatctatctatgtatatgcctatctatcgtctatctgcctatctgtctatctattatctatctatgtatctatcgatcgatccatccatccaccccattaggctgtacctgatgggggcagcatcatgttcctcacatggtcaagcatggctgtgtgccaggggccttcaagcaacatttaaagctaaagccaacgatagaaaccataattaataatattttcagacaggttgccaaataacatacatgtaagcgaagaccagatgcatttcaaaaatgttcaagaaattgaatgtgaataaattcattgcttaaaagagaatagcaaatggtgcatgctgtgtgatatggtaacgacaacagcaatactagcagtggtcatctatcaagtgctagttatatgctaaagactgtgttaaatgttttgacatccatcaccttactgcatcttcccaaaaccacaggaggtagatatgattatctcaggaaactgaaactcctgaagttacatagaaaaatggccacacagttaatgagcagcagaaagataatttggccacagatatgcttaacttgaaaatctgagtccttaaagatcgtatactgtgccctctcttcaaatcctaaagaaatgacaagagaaagaaaggaaggaaggaaagcaggaaagaagaaatcaaaggaggagggagagaggtagggagggataggagtcaacattgaaaaacaagggataattctaacaactggccagaagttatagaaatttatattgtaacaacaacaataacacccatctacaatcccttatctgcaatcccacaatccaaaaatacctcaaaaatgaaaaagtattttcatgattcacctgctgccaaaacatggcccaaatggacgtgaggttctatttgagccttgttcattacacacagaataaaaattccacagttctgctgaagaaatcttgaagcattactgccccacattccaccgtgagggtgtagaaaacatgcagagtatggtaacatttacttttagatagctatctaaaatgtgagaaattctgaaacacatacagcccctgaggcttgcctaagctgagagcatgtctgctgacctaagaatccctctgccattatatgtccttgacagtcaagacaataagacaacaacctgtggtcaaaatcaaccgacaataacagaaatttagtgaaaaaagaaacatacatctcaataactgctgaagaaaagcagcctcctctattgcaaggagaactcatggcaatgttatcctattaagatctgacatcaccttctctcccttccaggctaatttcttaactcagtttagtttgagcccaagcaagggcctgttttggactctgattacatttgaacaccccaggctcactcacccttggcctggaggcttccggaaatagagcattttgttacatagtttccacagaaaagtagggagagtttgattgaaatgatttataggaaatctaagaaaaatcttagcatgcacgatatcatttatatgcatttgaaaaatacactgtgttagtttctatggtttacagattcacaaatacgttgcagaggtttcaagatgtgtatagaaaatgtgagtgggacctcaattctatctaacactcgtattcataaaaaaaggaatgaatgaaatgtggcaaagcataaacatctgactctatgttgggcttaagtacctggtttttgttttctttcgtgctttttgtttttgtgactctctgtccttttctgtgtatttaaaatacaattattcgacaacaaaaataaccctcacaaaatatctgctctgtaccaggcacaagaatgacagtgaggataagagagacaacatccctatttgaaaggttttataattaaaattaaaaatgtatgttaatttattgtgtcttcttgggattagaaaacaaacagaatttattagcattgtgttgatttgcttcttttagtggagtttagattgataaaatcattaacactaacagattgccctaacaaaatggacatatttccaaattctagaaagacttcaggcagggagagcaggagggaggccattaagctctcttttgtaagcaggatgtctgctttggggcgtgtccaaagggaaaaaaggcaatatgagaatagagaggtgtttaatttcagcttctaaaactgcacctgtttctttgagcaaaagttccctgtttggcaaataagtgtaaataatatagtaaattaacatttgagggaagaaaaccctaaaattgagatttttatgatttaaaatatgcctagcaagatattatttttttcaaagtacttattgaacacatagggttagagcataaagtaacatgcccagccttgtggcagcccgtgggcatcagcactgggtgtgtaattacagaggttacctgaagcctgaggaataagcacattacgttgttaaaacaaacaaacaaacaaacaaaaacacaacactgtgaaaagacagaagcactagaatttataagcattgatgattatgtaagaaatatctaaagaaagttcactgttaatattgaaaggtctaatcctggctatcttttaccttcagttctctacatttttttcctttttttaatcctctatcaaaattattatcttgacagacatgccagccttaatatgtgctcttgcttaaacagcatgagttccgtgctttatattgagactggcatatttaaattcaagtgcagacatacaggagcgtcctattttggccataagtgacgcaaagtccaaatcttaacactcttctcccaacaagcatgcattgaacagcagatatcagatgtcatcttctcaaagttttgctttatgccaaagttaccattaggattagcttagctctctttgaaggcaattaatgagaatggaagtgttaggggctggatgtttgtgtcccctaaattaatatgctggaaccctgttccccaacatgatgctatgggaggtggggcagaatggaatcagtgccctcagagagccacaagaccactcacttccttccctgctccctgccaggcaaagaaagaaggagaagtcggcttctgccaccaggaagagggccctcaccagcaccctgcgggcatcttgatctcagacttccagcctccagagccatgagaaatgaactgttgtagtttcagcgacgcagtccatcaaactttattacggcagcctgaacagggtaaggtaggaagtaaatgggaaacaaaataaaaaggggagagtgcctgaggtgtcatcagaagcccagcttgaggggctctgaggtatgcaggggcttttcatagttgtcaatgatgtgtgtgtgtgtgcacatgtgagtgtgtgtgtgtgcgcacctgtgtgtatgccagtatgtgtagtatgtatgtgtgtggtgtgtatgtgtgagtgtatgtcatgtggtgtgtgcatgtatgcatgttaagtgtatgtatgtcagtgtgtgtggtgtgtgtatgacatatgtgcatgtgagtgtatgtctgtgcatggtgtggggggaatataagcatgtgagtgtatgtcaaagtgtgtgtgtggggggggtgtatatgtgtgtgtgtgtggtgtgtgtggacatgtatgtgtgtaagagagtatgtgtgtgtcctgttagcaggagtgtccagggccaggtcactgaacacctccatatgcacaggccagtcgcacacaacgtggaattgcctgtgttgccggcactctcctcccaccgcttcaacactggaccacgtacatctatagactttgtctctgggcatccaattctccctcttagaataagagcacttgggttttcctttgaggagccatccctcatgggcatgagaccaaggtcatcacctctgtgcccctagacatggtgactcgttcacagataggcatgtgacatgacccttctcagggattttggagaaagaagactctttccccctggctactgagctactgtcactggggttgtgtgcaacgtgccatgctaggtatgccaaggagccaatctaaaccagagtactccaagagcagtaagactgacagcaagagtgagaggtgctcctgtcagagtttctggacaccttgatgcttctgggcctgaaggcagttactcctggagttttcagttctgtgagccaataagacttttttttgatttctgtttgtcacttgcaatcaagagttctgaataatgcaaattactgcacaaattcaaaactcagtttatagatgcaaaataaataaaattcaatattttagaattatgagtttataacaggcttataaatatgttttcagatatcagtctgctcaaagtctagtcgagctacaacatatgcacaaataatgtatttctattcacaaagccagtcttttcttcctaagtgtctcccctctcctgcaaatgtcctcttatccatagtccgggataaaggaaatggattattctaacggctgagaaataccttcccactggcatcgcatatatatagaaccagtggtaaagtctgtagggagatctgtattggcatggaaggagtaagtggggactccccactgggacttccattgtattttctcatcatatttgtaaagacctgactcttcatttattgttatcaaggcctgtgtgagtttgctaccttgcaatatcagaaattgaggaggaagttccctgccctgtttccccccgggatgaagttgcagatcacttggagaggaccgacaggagaggaaagaggaggcccctgctcctgatggcacagcaccccagggaaagtgatcaaaaccagcagaagcaacaaggaaagtcagctgtgccgagaattgcattgcaaattcattccacgcgtttgacctgtgagaggaagtgttccatgctttcatgttagggaaatttggccagactgggagccactgtccattgctccacagacgtggagtgcccactacttccttgtcagattgtcagacagtgtcctgaaaataagggacaacagtggatgtgacgaagaacctattttgaggacttttgttcagaggagaagcaacaaatggtacacaggtgatagggcttggatgtttgtcccctccaaatctcatgtggaaatgtgattcccagtgttggaggtggggtctggtgggaggtgaccaggtcctggaggtggacctcccatccccttggtgataagtgagttctcactcagttcgttcacaggagatctggttgtttaagagtctggaacctcctcttctctccctcttgttcctgctttccccgtgtggtgtgcgtgctcctgcttcaccttctgccatgattgcaagcttcctgagaccctcaccagaagctgagcacatgttggtgccaggcttttacagcatgcagaactgggagccaattaaacctcttttctttataaatagcaagcaaaggaataaaggaacggcagaatttcaaagaaaacacagaggcaggctgggcatggggaggtggcaaattcagagtgagtagtcaaaagcagccttctgggtgcatccttcctgaactacaacttgaatgacaagaagagaccagccaggccctgtcaatacctgtggacagaatcctctgctgggagacagtatgtgaaaaatctccaatcaggagcaaggagcaaactggactctgagcaggctgttgtggaacagggctgtccccttggccttctgtgagtgcccactgcacctgttccccttgcctggaatgtcctctccgcactttcatttttctttaaccaatctaaaggacaacttgtcactttccagggcataaattccctgacctctgacaggccaggtcccctgaaattccccgtacagcccccactcctgttgttcatttccagcaggtctcacaattgtaagcaggtcattatttacatgattacttgaggtcttccccaagaccataggcccatgagcacagacacagctggcactactgctcaccgttccaccctgggcaccccatctgtgccgggtctggtccatggcaatgcccaatccatccactttgaatgaatcagtgaatgaatgctcacagacagatacacccccatcttatccagaagacagaaattgtccgctgccatgacctcgggtgtgaagattgcagaaccatggttaggcacgctgccatagcattccctgagtatctcatgccacctgttctttgggccctaaggtgacttagagtgtggaatcagctcaggcttttccccaacttcagtttggtaaatgtctctcctggctgacacctgctagagggccagctcctcaggtgcctgtggagttggctgcatccctactctcagtggggactgccaacaatttaatggtaacctgaggagaccaaccacatctccagcatgccaggaagggagaaagaagcttctgtcctcttcactgctgatgaagataggcacatactgatgatgggtggccacagaaaagcattctaaatatgaggaggatgatgatagctacacccatgcactgtgcatgcccagccctgagatgagtgttttctatgcagtacctcatttaacccttaaaacaaccctatgagcagagtagtatcatcctcatcattttccagaggagaaaaccgcggaacagaagggctaaataacttacccaggatcacatagcaagaaagtggcagagcttgggttccaggtggtcccattgctgatactttcatccctgatagaattttgccacacaaatgatgacctgagcccactctgttcaccaacacctgttcttcctcaccttgcatgggcaatggctgcttctgcttctgcctacagtcaggctggaggctttcagagggaaggattcctttttataagtatggtaaagcccccggtggttgttttcctgggcgttttgtacttgaaatatttaggccctcagcactcacacctggccactgctttgcccctgcacctgggctacttcaggtctatgggaccagttgcggttagcgctagacaacaatgacataaaaatgaaccaaatgttccaaggatcagaagcatggactccacagactacttcaaagtgatgtgcagcaaggcacaagagttccaaaagccactgtggctggttagttccccattaagttgcttccttggttggctttattatttcatctgctccattagtgaacagcaagcgttttgcaaaaaaggcattgcacagcctcaccaagctcctagagaagcctttctagaagctgcttcatgtatccccacaaagcaacatgggcagcaggttggtgggatgccccactctcccgaagaagcagcagacttatccaggttaactccctcctctctcctttgtccccaacatgcactgatcaggaagatgaaaccaagtgaaagccacttcctgtgtgggtcttaaaattcaataaaaataatatctcagaaaaaagccagaacacactttctgttcagatggaaaaatgcatgtttccctccccaccttcacctacaagctgagttcatgttatttcaacagcacatcatggacccagatgcaaatggacagtatctgaaatgcagtcccgagcaggagaaatgtagtttcatcagcgagtcatttttaaggcttgatttctatttgtatttaaacatactatcaaaaaataaatacttgcatattttgtggaatgtctgttgaaaatatgtgcccaaagtgtctaacttgggacaaatctgacctcagtccctggaaggctaccttcgatttatgcctcttgatatggcttggctgtgtcctcaccaacatctcatcttgtagttcccataatccccacatgttgtgggaggagccaggtgggaggtaattgaatcatgggggcagttacccccatgctattctcgtgatagtgagtgagtcctcatgataactgatggttttataaggggcttttccccgcttttgcttggcacttgtctctcctgtcgccatgtgaagaaggatgtgtttgctttgttttctgccatgattctatgtttcctgaggcctccccagccatgtgaaactgtgagtcaattaaacctcttttctttataaattacccagtctcaggcatttcttcataacagtgtgagaatggactaatacacctctccactctgaatttaatttctttggtttggttttcaattatcttatctatcatagatcaaaacttatttccccagtaccttccttctaatacctttccaaatttttatctggaagtagaaggccccagtctcattctattaactctgctatcccatagccagcatgtttagagataccaaatacagttgctagagctccaggcaacagcactgggatccagtcactagccatcctctacagtgtctgaaaatgactcgttgcctcactcacttattcagcaaacacactgctgtacactagtccctgcactgggtgctgtcttatgacaatttccccagcctccagccttccttgcatttataaaaggtactgatatgcaccaactcacatcagtggattcagttacacacaatgacaggcagcatcagttgtgtttgtgcagggaagtggtcttcagtgctggtagaacataaaactcacttggaaagtttttcaaaatatgaatgctggagcccaagcccagaccaattaaagcaaatctctaagggcattggtatttgtaaaaatccacccagggggttgtaatgaacaaccagggctaagaacctgcagccttgtcactgacaataccagccttggaccagcagattcagcaacacctgggagctcattagaaatgcagaatcctaggccccacaccaagctactcaatcagaatctgctttatttaacaggattcctgggtgattcatgtgcactaaactgtttaagtactattctgggagattagaacataaaactttatctgttgaattaatagattgtattacagtgagctgcatgtcatatcattttcagaaactaacgtctgtgtaacagctttcctggaagatgagatcactccagaccacccagagatgcctaaggactccacttcctttcagtagtatagtccagtcaaaagatagtgattgggaaaaaaacaaagaaaagatacagaaattggggctaaaatgaggctctgtaatgaaaagattgtattgagttcaggaagcagttatatcacctccgtgccaaacacacacacacaccagataataaattccttgagtgcagggattgcgtatttctcttattcatagctatattcacaaagccaagctcaagaccttcacagagtcggtggtcactaaatatttcttgcatcacttagtgtcctgaacagagaacaattctgttagtcatttattttgagaccctagacgaatctctccacctctcagtggagagattttcagtgtcttatctatatgatctgtttaaattatttaccctaagatacaaaagcaacaaagagctcactgatgaataattatgtgatcaacagacacagggaaagctccttatatctaggagaactgtggactggtctccacacttccacaatccacgtgcccaaagagtaattagtacttggatactctcaacgtgtactcattaaatgaagagtcatggagttcctatgtgccagttactattctagaaattaacagaacagaccaaaatctctgctttcctgtagcttatacactagttgtctataattcagtcaccaaagtgttaaagaatataaagacagataaaattactatcattctattttcccaaatgttgttatatatatttttttttttttttgagacagagtctcgctctgtcagagtacagcagcttgatcttggctcactgcaacctccatctcccgggctcaagcaattctcctgcctcagcctcccaagtagctgggattacaggcgtgtgccaccacgcctggttaatttctgtatttttagtagagatggggtttcatcatgttggcagggctcatctcgaactcaggtaatctgcccgcctaggcctcccaaagtgctgagattacaggcatgagctactgcgcccgaccatgttattataatttttaagcctacaatatacttttcattttctaaggcttgatttttttcaacatatggctataataaaaaaaaaagtccaaattcaataccatcacacacatcctttaaaaaaataccaggacaaaataattatgattatgattttggaagttgtttataaaatacaatgtcacaatatagtactagttcaagttaattcacctaggtctttacttacaaataaaatcaattttcccatgcagctattttaagagaagaggtgcaatacgttttttaagttatttgtggtaaagtacatgtaacataaaacttactatcttacccatttttagaggacagttcagtattgttaactcggtacttattaaacaatttctcaatttctctttccttccagcccctggtaaccaccgttctaactttctgcctctgtaaatttgactgcttatcaagaccatcctggccaacatggtgaagcctcatctctactaaaacaaaaaaaaaattagctgggtgtggtggcgtgtgcctgtagtcccagctacccaggaggctgaggcaggggaatcgcttgaacccgggaggcggaggttgcagtgagccgagatcgcgccattgcactccagcctggtgacagagcgagactccgtctcaaaaaaaaaaaaaagtgactactttagatacctcatataagtggaatcatatagtatttgtctttttgtgacacgcttatttcacttagcgtaataccctcaagattgttgtggcatatgtcagagttctctttcttttcaagactgacaaatcctccagggaatgttatgtaccacatttgcattactcattcattgggtgatggatatttgggctgttcctatcttttggcgattgcaaaaaatgctgctatgaacatgggtgtacaaacatttccccaataattcatgtttttaagttagttctcagttgcttttgcataggtgacttagcattcctaatcagaacacaatcaactcaaacaaacagaagacaagccaaatgtacttttgtcatataacttgtacaagagaaaatagtctccattaaaaaatattgtaatcagattataagaaaatgcatcctgaggtaaaggcaggacctaaaaagaacttaaaaatactactttgccatatgaaagcctgagacaagcttaacgagacaccattcacatccacagtctagtcacatacgtgagtgtctaaaatttctcccaactgtagtctttgaccaggtttactttcctgaagaaatgtaaaagttcattttcctcaccacatgattttaggagaaaatccatgcacagttttaaataaagggatatttagaaagagatcaaagagagaaaaagacatgatccaaagtttgaacactgtaaaacttataaggagaacagataatttcttcaaaggaagaaaaggcgaacagactagcctgaacaaataaaaaagtctccatacactaacatgaacaaagaggcctggcacagtggctcatgcctgtaatcccagcagtttgggaggctgaggtgggtggatcacgaggccaggagttcgagaccagcctggtcaacatagtgaaactccccccccgcaccgtctctattaaaaatacaaaaattagccaggtgtggtgggtggtgtgtgcctgtagtcccagctacttgggaggctgaggcaagagaattgcatgaaactgggaggtggaggttgcagtgagccgagattgcactactgcactccagcctaggaaacagagcaagatgattccttaaacaaaaaaaaaaaaaaaaaaaggatgactatgggaaaaatggaaaaatagtttaaatttataaaaatgaactgacattagactacatggaaaccgtatggaaattgaatgaccattggaagtaagaagaatataagacagcagttctccaagaaaccacagtcagacagaagagcagaagggtgctgtattagtcatcttaggctgctgcaaaaaataccacaggcaggatggcttagacaacagaaagttatattttcacagttctggaggccagagtccgaaatcaagtttccagccactgtgtatctggtgaaggctctcttccaaacttgcagacagccaccttctgtgtcctcacatggcagagagagaaagagcaagctctctggtgtctctcccacttcttataaggacaccagtcctattgggttaggtactgccctgatgccctcatttaatcttaattacttccttaagtgcctcacttccaaatacagtcacattgggggttagggcttcaacatatatggcttttagagagggacataacatcagtccgtagaaggtgctcttggtggtctttagtttagcttaagtaaatttagcaaaattatagtgcctaataattactgtgagatgtcgaccatcaactgctatatccggagttggaagctggaaagagaggtccctgtgtctctttttgcttcaaaggccaaaactatccactttcttttattttgactaactggaaatcagccaacaaaaatgcagtgaagtcagtgataagtctgacctagcatgagtaagataaagctgaaggtgaaacagaaaaaagaaaacagcttgagcaaaggtaggaggccagagtagtatattcaaggaaggcttcagaaagatatttatagtgagcctaagtggctcacaggacatcctccgcacacacatatacaccaagaacagagtgcctaaagggctttgcctattattaatgctattcaatttctgattgataaccttaaataatagagtttccacacctattgatggtaccaacatgcactaaattccttacctgaatcatccttgatgactgtctttctctcacccccacatctaatctatcagccaacataccaaagcttccccaaacatctctcacatctgtcctttttttctctgtccccatgtctgccactcaagtcagtctccaccagcctcctactagtcatctaatggtatgtttgctctcccccgcacttttctccacacagcaacagcagtcacatcaatccccagcccagaattcaacagtttgccattatccctgcataaaaatccaaagctattgccttaaccaggaaggcccttcatatgcaggctggccctgccccatcccttccctggccacctcccatcctgactccctatccaagctcactccacttaggggtcttccaccaaccacagtcccctccacctgagcacccacacatggttggttgcctcttgttccatctttccttccacttcacagctggccatttggagttggctgtgatggtgtcttgttttacggtagtaaagataaaaatgatgccccccccaaaatacaaaaaatggaattagaatccaatgaaacccagtgtatctacatattagactttataaaagtagaaatttcagatttattcaagacctataaatgttgtttggtcctatgaaaacatctaactcatatttaaccctgaattgttgaactcaaggccttaaacaacctcaattttatgcaaatcacctctagtggccttacgttggaagtagttttttctaaattatattctatagaataacatgagtggtctggtggtatggcttggatctgtgtcactgcccagctgtcatgtagaactgtaatccctaatgttggaagtggggcctggggaggtgattagatcatgggggtggatttcccatgaatagtttagcactatccacaatatttttcagatggtaagttctcatgggacctggttgtttaaaagtatgcagctcctccctcactctctcttgcttctgtttttaccatgtgaactttctgctccagctctgacttccaccatgagtaaaagctccctgaggcctccccagaagcagctgctggcaccatgcttcctctatagcctgcagaaccgtgagccggttaaatctcttttccttataaattacccagcctcaggtatttctttacagcaatgtgagaatggactaatacatctaaaaagagaaaataaaaataaaaataaactaatttaattggttttaaaaagtggccacaatcactttgacattcgtgctgcatggaactgggttgctattgcttaatgtattatttcctaaaattttttgaaccagaatccacataatcttttccctatcttcctaatctctccatggacacagtttgagaaatgttggtcaaaaatatctcattttattagctgagaaggaatacactcaacttggagatgattcactagtcttaaaggaccattttatttgtggttctagtctttggccagaatttagagctcataaccaacagaaaaatgcttcagttgttgtagcattaatttttaaaatatgacatttataatctgcctattcctggcttggtcatgtgccaattgctcatgtttaaacatgtaatctgaagtttcaagtaaaaaatatgatttgtcttataggtgtttttcctcaacttttcattatagaatattttaaacacacatgaaggatataacgagtataataaacctccatgtaccatcccccagcttcagaaattatcaattcaggctacaacctcacccctggcaatggattgttttgaagtaaatctcaggtatcattaaaggtattttctttttctttttctttttcttttttttttttttttttgagacggagtctcgctttgtctcccaggctggagtgcagtggcgcgatctcggctcactgcaagctccgcctcccaggttcatggcattctcctgcctcagcctcccgggtagttgggactacaggcgcctgccaccacgcccggctaatcttttgtattttagtagagacggggtttcaccgtgttagccaggatggtcttgacctcctgatccacccgccttggcttcccaaagtgctgggattacaggtgtgagccaccgcgcccggcccataaaggtatttttaaaagctaactgtcagttaatatttgttactaagagtaaaaatgccataacttccacactcccacctcattatataaacacacacacacacacatgcacgcgcacacacgtacacacgatgcatgttcattaaaacgaataatcccagctgcttctgctgtggggctggcatctctgagtctatttcatggcatggcatgggaaggagtgttgacggatgcctcacatgtgttcggttactgttgataaggacactgtataaaatatttgccccagaccacggggactaatatggtagcacactttcatctgtcagattggcttgatccacacaaacctgtcaacaaaaccaggtcagcaggctggagtagagaagggaaaaatcaataaatctttgaattaatcatgcagctatcagagagaattatgggttcacacagtgaaatgtatacttgggcctatttgctcctttcttcttccagttattccttcatttccatccaatgtagagtccctcctatagaatccccacgccaataacttcgtttctgtaactaggttcaaataactgtccctaatttacagcttctgttccaccataattcttctaagaaagggttggagactaaagaaaaataagtccaatttaaatcacaagaaaagctgcattctaaattgctatgagtgttgcctctagtttttaaattcaggtcgtatatgttagtcacaaataaacaaataaatcttgccataaaactggatttttacatcctatataataacctgatgtgcacaaataattttactgaaccttcacagaggttctgatccttgtcaccttgaatatccttgctgttacacagagtttacaatgtttgtccctcgtgccgcctcctcaatttaactaacccttcaaaagagaaatatctttaatcacatatctatagtccttcctattctccttctgcataaccattttacaagaacacatatactctatagccactattagtaaaaagcagcatcgtcttagatccagaatttaagatagaagtcactatgaatatatttttcccaccaccaaaaaggtgtaaaatttataaactgatcaataactatgcaacaagtgtatattttaaatacatgaaattacttttccagtttcaccatttttcttgaaaagaaagtaatcatccatatccttactagcaagaaaagctttgtttttaaaaatctcaatacaaaactaaaaacacttaaatattttgataaaacaagagagaaacattcatcttatgtcaacaagtcaaagccagtaaaaaaagcacaagaaattcaggaaaatacacatgttcaggaccatcaactaagcatgtgcagagtcctatcaaagtcatgcatcaggcctcgcggagcccagaggttctgcatgttttgcatctgaaatggacttcaggctttcatggaaaaggtttactggagaaccctgggaggcacggccagcaataggatgttcaggttttctctacttagcgatggaattgtgtcgaattcagtaaaagaggaaatgcttgagacttcgattgccgtattgttcttttgtttgcttgtttttttgttttgttttgttttttaatttttaaaaatttttttacttagaggcaaggaatagagtagattcagcatcagaggaattgacttgatggggacacagtgtgggacacagactgacatggaaagttcgaacacagaatttactgaccttgaataaatccttgtggatcatttaaaaattacctgcaaggctgagatacacctttcttcaatatttcatcatgcatggtaagcatttggcaatacagattttttttaaagtcttgaatcctagaataacttttttaaagaacaaattacttcgcttggaaatcagaactgtggaaacgagtcacgtgcatccgggcctcgtgctccctggctctccaccgagggattcagcctggctgcgttccgttttgggaaatggccctcctcaatttcaagttcatttggctttttcaatgatagggtttcaattcaaacagataacaatgctgagaactaaaaatttcaccatctaattagccgggggggaatctcagtatggcctttctttcctagtatcatctgcagtttgaaaatgacttgatgaaggctttttataaaaaccctttacttttcctggtacaagaacaattgtagtgaaagatactggtacaatgcaatgggcataggaggataaaaaaaaatgtgtgcataaaaagaagcagaggaaaccaggacaaataagagatcagagaaaagagtgtggctgaaggtttcaaaatgcaatttaggttgaaaaaaaggaagacacgatccaacatctatatcaggcattttaatggagtatgaatccctggttaatctgggtaaggacaagtgggagccggggggtgagggaatgcagatagtcacaaggttgaaaggaagcaaaaaaggcctggactgttgcagctttcgatactggtgtgttcttctgaagatccactgccccatagcttttattacttactcaacatgtccatgatccccccaaaaagtcaagaaacattggcctaaggatatttccatctattaaaaaaatatgtatatcgactgaagatctatttccctgcctcccaaaattcatatgttgaaacctaaacctcaatgtgatgctatcgggaggtggatcctttggagggtgattaggtcgtgagggtggagccctcatgaatgaggttagggcccttctaaaaagagaccccagagacaccattcgcctcttctgccatgtgagaaaatgagaagacagctgtctatgaaccaggaagagaaccctcaccagacaccaaatctacccacctccttgatcttagaattcccagcctccagagctctgagaaataaatttctgtcgtttataagccacccaatgcatggtaacttgttaatgcagcccaaacaatctaagacaatatttatatataatacttttttttcagaaattacaggtaaacattttcagatatacaacatattatttgcattaaagtatattttaaatatttgatattgaagtaaagctcagttataagtttatttcaaaatgaatcattttgggaagtacagttttcaatgaacttctttcagaaaaataagtctttgtaattccttcagtataataagcctactgattataattaggttatatctggcgtgtttctatctcttttgtgtctttttaaaacaggtcatataatttttaaaatggcaactttaaaagcattgccttatccagaataagtgcttaaatgacagtaatggagaaattttcaactgaacacagaactagtgcagacacaaccaccacaaaatcccaggttggagtccctgcaccgccattcactgctcaggtgacttttcacatctgggtgctttcttcatctataaaataattctccgatgagaaatcggagccagtgatagagatgggaggctgatctaggtgatatttacatcctcatatgggcgcgtgtgggtgatctgattggctcagcagctgtcatttttgccatccctttcccccatgtaacctttccagggctccagtatccagctcaaaaagacaccctgaagcttctccacacagaaattctaccattcttagatccatcatcataaattggtgaagcatattgatcactatttgaaacaacatgccctcacacacaaaagctatccatggcaggttgacactctgtgctcaccaaatgtgtataaccctttagataaaaaactgaaagtaaagtctgaggctcgtggtgtggctatggattcagtgcatcaggaaatgctgtaacgcgcctctgaaggtctcggcatgtcagcctcgccttgacttgcactgtcctgctttttaacaaatgctgcagtgtaaagctgtaggtggttccaacaataaaatcatttcatgaaaataaaagaagacagcttttgttttgggaataataaatactgggaatttgaaatgtcgatttccctcagaacggcatcacgtaggagatgtcagctatgaaatcccaggctgcccctgattggccaacacaggcactctttgccttgggaggagaggctgatgtgaaatttgattttagagtagtagaaaaaaatatagaaaagcaaaagctcttattaaagcattaagaagaatttaaaaggaaataacaccaccactctcatggaaaagtttcttattcaagattcactccataaacatgtattaagcttctactatgtgtctggaatggtaatgttatcattcagtcgacaatatttgttggctcttatgcacgtacataatatgggaaactgaaagaaagtttaagaaaaggcaaaatctctatcttctagagagggagaatttcaagaaaggaccttgggtcacttactgaagctctctctgcctcagccttctcatctgtaaagtggggccgacaaaagcaattacttaatggggttgtcgagaagtttttaggtataacctgacatgtgcatgccatagaattgttagctattcaataactgacatgtgctacaagtattttaatgtaaatactaatgtttactgcaaatacatactctgatttagctgtgatggttaaggcaaaatataagatcctttcattctgccttattgtcattttatatcatacttttgctatttaagaaaaataaacgttttaataaataagtaaagagttgtttattttaaaatcctacagactattagttcaatagcattctaatgcttttatgttgaaattgaaggattttggattatttccccatgacttcttcagcataccttgcattttagcaattcttaaatagaactacttttcttttacttcctaacaagcctcacacaaacaacggcctatttgttttgaaaccacggtgtcctgaccttctggtttctgggatacaaacactttagacagaagataatgataataataataagaagaagaaggacaatgacaaacattaatgtcaagcactgtgctaagaactttacctatattaattcatttaattcttataacaatcttactataatgttatttttattcctatttccattttacagttgaggaaattgaggcatagcaaggttatatgactaactcaaggttacgtaacttggtccaggttgaatatggggtatggacctagacactggcttcaggctccacactatctacaggctctatagagaaatgcacacctagaggtccagaattacttagctatgttccaattcatggagcacctcacttggcctgaaactgcagttatggcactcttcatctttataaaaacacagtacccaggtccacagagaggtatttaactatggaaggtctcacaactgtgcagtagggacccaaagccaggctcctctgagtgcaaacccaagccctgctgtgcgctgctggcaaaatgaaagacatgcagaaacctgaaaccacctctaagagcacacaggatctgtgtatttttgcttatttactgtatctgtttatagcttcttttcaaagaacattttgactctgctctactgcagagcagtgtgtgctgtggattttctgttgctcataaagtccaattctggacagccaatattttcagcagcatcattgtattttcaggaactacacacactcaaatattctgtaaatactctcattacttctcccatacatgagccttggagagtcaatgcaactttgcaaatagaatttagttgttgaagtttcaaccacaggtgacgatttagccaataaaaattcagttagtttggaattaattttggaataactgtattttcaggaactacacacactgaaatattctgtaaatactctcattacttcccccatacatgagccttggacagtcaatacaactttgcaaatagaatctagttgttgaagtttcaaccacaggtgacagtttatccaataaaaattcagtttgtttggaattgattttgtaatcaagggtaacttttgaggcaattttttcatgcacatgttttcagactactaatcacttgggaaactgatgagtcgtttgtccattaacaaatttcccccttttccttttgaggaaggaaacacaggacttgaagatgcccaataaaccgtggcacccgaaagtgaggatctgaaatgcaggtgaagcagcttgcctgccgcccctgtgcttggtccaggactgcctggatcctgtcccctactggcccccagcccgttctgacacagaccaggctacttgcagctgggacagcggcagctggtggtgtggctgccagctggatgctggcgccgccggggacagggctgcagggacccacaggacctggcacaccagcactcctggctaccctgatggggctgtctgctttttgtttccttcccttaaaaatgctttttttttttttttaagaatctcattgagtatatatttatcagttgtctactgtgtgtccagcaggagatggaaagatataaaatgtgtgagagagggcaaataaagaattggaagaatttgtaatcatagtgggttaaatagcttcccccaaaaatgtcctttctggagcctcagaatgtgaccttatttggaaacagggttgtggtagatgtaatcatttaagttaccatgaggtcatactgaaataaggtgggcccttcatccaatatgactgttggctttattagaagaggagaagaaatgcaaagacacacacagggcaaaagtcacatgtcgctagagggagggactggatggagtgagacttctgcaagtcaaggatgccaaggagccaaggaccgcaggcaacaccaggtgctgggaggcctgacagggaccctccccagagtactgacagagaccctccccgcagccctctgagtcagcacagccctgctgacgctgtgactttggatttgcagacttcagaactgtgaggaaataaatttctattgtttgaaaccagtcagttcatggtattttttttttgtagtcctaggaaactaatacagtcatgatattgaaaaataaatgaataaatcaaagggaaattcctttgtggtcatggggaaggtttcctttgttggaggtggccagagggatgcgggggagtgaataagcaggaccaggagagaaggcaggtccgaagttggggtcacacaggtgcaagtcatggatgaagccctggaagatgatgaaatgaccaatacagaaagtggatgggattggacttttagattgacatacatttctgagaggggaagatgcaaactgaaggaaagagatagcaccgaaatattcagagagaagatcaaccaggcagtgtagttggatacaaaccaaaggagagcaactgctatgaactgccttgtgtcccctaaagttgtagatgatgaagccctaaccccaaagaaagagagaaagagagagaaagaaaaagaaaaaagaaagaaagaaagaaaaggaaggaagaaaataaaggtagaagagagaaagagagagagaaagagagaaagaaagaaagagaaagagaaagagagagaaagaaagaggaagggaagggaagggagcggagggggaggggaggggaggggaagggagcggaggggaagggagcggaggggaagggaggggaggggaggggaggggaagggagcggaggggggggggaggggagggaaggagaggggaggggaggggagggaagggaagggaagggaagggaagggaagggaagggaagggaagggaagggaagggaagggaagggaagggagacctgagcacctgtgtcacaagaaatacagtaattactaagagaagtaatttggagtatgaaagtaattaaggttaaatcgggtcataagggtggcccctaatcggatagaattagtgtccttgcaagaagaaacatgagaaagtcagtcatgtaaggacagcaggaaggcgtccatctgcacgccaggatgaggcccccatcagaacctgaccatgctggcagcctgatctcaatcttctaggctccaggactataaggaaataaattgctgttgtttaagccacccagtgtgtgatattttgttttggcgtccagagctgccaaatacaggaaccaacagaggaagtaggtcaactgtgtacatctaacagggaggtcagagagaaactggaccaggagacagccttgggatttaacatttggaagtcatgggtgatcttgaagtagtgaatttcagtagattgtaacaggcaaagcccaaaatactcactactataaactattatctcaaacagtttgccagaagaaagagaaagaatgaaaggagtgtgtgacagagagagagaaagaaaaaagaaagaaggaaggaagaaagtaaagacagagaaagaaagaagtatggaagttagcaaagggaaaggtttctttaaaactgggggacctgagcacctgtgtcacaagaaatacggtaattactaaagagaagctgtctgaagcaacagagggcacagctgatgaaaagaggtcctagaacgccggagcaggtaaggggaccaggagggcagcacggtgggaggctaagctggaaggaaagaggacagctcttcctgtgggagagaacgtggggctgagccatgaaggaggtagaaagggtcatctgaagaaagctgttctcagcccctgcagagtgaaaagttacgatcctttgaacactggagagtaggtgcagcagagttgagaatggggtgctccaggatgctgagaaaaagcttgggaaagacctcttcagctatacagacgcgggcgcaaaaacacctgagcatccagacaatcagtgaagagctggttaagaccgggccacgcacggtggctcacacctataatcccagcactttgggaggccgaggcgggcagatcacgaggtcaggagatcgagaccatcctggctaacatggtgtaaccctgtctctactaaaaaaaaaaaaatagccaggtgtggtggcaggtgcctgtagtcccagctactccggaggctgaggcaggagaatcacttgaactcggtggagaagaggttgcaatgagccgagatcgcgtcactgcactccagcctgggtgacagagtgagactccatcaaaaaaaaagaaaaaagaaaaaagaaaccggactggcataaatgctcaatgtgcccagtctgcaggaacgctccacaggctgacggtggagaagggaagcggggtggctcctagactgaggattccacaggtgacgcggttgctgaggagagaggaagtctgggctgctggatggtttactccatcctgccccatctgctcagaaggacagccacaaagggctgacagccatggtagctccgcctgagggatttctggaggccaagcaacccatctgcttaaggagaccttcctccacctgctccagcccagagcaaaggacacagcaccataagcctggtccaacccacctttatctctgctcgacaataccttgagttcacactgacttcttgagtagctagcaagttattctgagtcaaaaattatatttctcaatctcaaatcctgttttcttatactgtggcacattgtctaagcaaatcttgatttgtgacatctattttagcttgtcgataataataataatctaacagcattatggttatcactacacaatattctttcctaaatgatcctgttattctcttgaattttcctgaaatgaaaactcttagatgaacaacagaccagagaatatgcttgtgtccaaattacatctgattgacttagctggccatctgtttcccatgtctagaaagaaccaaacatcacggggagagagagaaagcagaagatccttaatggcagaatataaaatgaactccatttacacttaggtggagcaagggaagagtatgagtcaatgtgttttcagaccttaaaataatttgggatgagacctttcttaaggcttgaaatacttgggtacaaggcaataaagtacataaagcatagattttcttcatttgctttctccagcatttcatgatgagcatatgcaaagtgatcgttgaatgtatgaaaatgaagatgagccaacatcatttaaaaagttgcatggcacagagaagagttaacacagtaggtctgagactgtcagtcttatgaagggctgcttgcaggactgtcccttggctggtatctgggaactaggatattggcagcgttcccaccacccttagagtggctcactgcctgaactgcataagcaatacagttcatgatgagcacctgccttccttggggagtctggaactttggcacataccaaacataccagggtgcctacgtgacctgcccccaaaggaaaccttggccactgagtctccaggagctctcctgctcccctggtagacaacattgcacctcttatcatgactcattgctggagaaattaagtgcttcctagtgattccacagggagaagacccctgagagctggggcctgctttcctctgaatgtcacctcatgtgccttttgcctttgctgcttttgctccatagccttctcctgtattaagtcacagccatggatgcagctacatgctgagtcttcctggcagatcaccaaacctgagggtgggcttggggacctttgacatgggcatgtaacatcctgcaagattaaatctaagaaagtgaaaaaataactttgacagcagttggcttaagaagtggaatattcaatttggaattttaatatcctggcattgtattgtgggagaggactagagaaatcactgcatatccatgggaggaaactgaggcaaacaaaaacaaaaacaaaaacaaaaacagagagagatagaaacgcctttccctaggccacccagctaacctgagtcagcgctgcaatcaagtcatattccagaaacttaaaataggaaatcaagggggattttagtgtgactgagtggcccaacaaatgaggttttacacacacatacacaacacacagatacagagcacacacatcacacacaccccctgcatatatcacacacacacacatacagagcacacacaccacatagcacgtactccacacacacacacacacacacagagctcacacaccacacacagcacacactccacacacacaccccacacacatacagagctcacacaccatacacggcacacacacacaccacatatacacagagtacacaccccacatgccacacacacaccacacacactacacacacatacaaacacacatcatgcaccacacacacgtatgcacacaccacaccaaacaccacacacatatgtggacacgcacatcacacacatgtacacacacccctcctgatatcctctgggctaaatttgccccaatgctttcttttcttgttttcttttttaaagaaaaaatattaacatacctatctctatgtgtctatctacttgttttggtagttcaaaagtcaaaagcgtacttctctgtgttgggttgtactccacaatacacagtttgcagctttcagaatgggtgcaggtctcctcctggcaggctgaggccctgcagactagctgctattgtggctgctttggagccttgctggcagctgtttggagactcaggctgtgcccctcgccttacacgacccccattcttggtgtcacacaggggctctccagagctgtaaacaaccagcttttaattactttcaggtggcagcggggtaacatgcaaaacctaatttagtgagcgatagacttaaatggaaaaagtataacataattaatgatttttaaaaagaaagagaccagggccctctcttcctatttctcagttaattcactcccaaaaatatagcatggtaaaaacatgacatctctgtgcctttctaattccagtctgatgtgcacgttctgagctgagaatactttccagtgtttaaaatgaggttcttatttactaaaagcaatataaatagaagattagatgatacatacaaagacagatagctaggtagatgataacagacagaaaaatgttccttttatacttttcatttggtcccacgaatttcttttcagtgaatgttaaagaaatgcttctttaattctgcaactctctggcacttttaaaatcaaagatgaggctttcaggtgactctaggttttttttaaatttcacattattttaatgtttatctcattccttttactcataagctctttgagggcagactcaggtctccgcaagatagcagccacagcatagcagatgtctggaaaatgctcagtgaggagcaataaaatcacaatagaagtgccacagaaagggaaggttaacttctatagtcaagagtgcacaaagcagaggccccccacagcatgaccctcaggtccccccgacagctgtgctagctctccctccctccccacatgagaatacggcatccaatctgctcttagttctggtttgctgaaacgtgcttaagggcagccttgtctaatttggttggctgtacctataatctcttttcccctctctaaaatgcaaaggttttcttaaatcacaacctcctttctgaaaccttctctacttccccaggcaaaaccgtgtgtgtagctacagcctcaggccctaagcgcctactgcagcacttaacaccccaagagggacagtgcaggaatctccccaagcatctcaacagcagaaaccatctctgcaggggcctggggagggagtgcttcttaaagcccaagtcttgcgtgatctatgatgcccagacccagttgtggcagtgaagaattacagccaatgtttcatgtaaagtggttggtttatgtcctttgatatttcatgtgggcagaaaattgttcacgtttagccaaaatacagaaagaagataatcatccttcgacctgaactcaatgatcctaagaggtaaaattctccttgaatcatcactaatagaggtattcagataggaaatattacagcagaaaattgggccactgctaaagagggaggcagtttctctgggaatagtaaaatgtttgctttttccattttccaaatccggttacccctgggctgtgtctttgatgttaatgtagctaaacccctggtgagattctcacaattttatcagaagaaacagaaacggaaggctgggctctcttactgctggcctccctaatcgggaggaaattcacaacaggcttgtgaagggaaacccaaatataaagccggtgttattgtttttttccaggatggtgttttatgtatctccacatcagcagtacctccaaaagcatgtcattattcaagctactatatttttactgggctacattaatattatggcatttaaaaggatttcattgcagcttaggataagtgatgaggatgtctaaaaaaatccacatagacatcatgactcttgttcttcctggctcattttagggaggtaagaacacaataggtcaggatctgtcatattaactgaggtcatctgatggcaccttgtgtgcctgtctctgaaatgcttttcctctgcacatttacgaccccacccccatccatcataccagagggaagggtcaccctgtaaggccccagggcccagggaagagctcaggcaggcagaaaagcaacatcagatattatgaatctttcctccatttggtagaattatgggatttctacttttcagctgttggggtattctttccaaaggtcactccaaatcaatgaactcattaatgtccttgataatggtagcctcatggcctcatatgatgaagaggcataacttgattcctgcgtctaccttcaggccaaccgaagcctgtcctggaaagaaatcaatgcaggccctaatgtgcagtaagctcccaaaaggaaccatgacaatatgcacaacactcattaaaccctgacaaacactgcatttgtgcttctcaggaaaataaactactcatttgttttcttaaccaaaataaagggcaaaacctagtgagacatactaatagaaaccattttgcttctttttagggaaatacacaaacatctttaattttgcttttcattaaaaaagaatttgtagaagacaaatacccatttaccttcaccaggatttccaaaggtcccctggcctagagattcacagaaacccaaagctcatctgttagaagcaggtctttgctgctccgaccttcccaggggatctcccaacagtcaaggctgagcagctaagcatcccccaggctgacaggtcacacttcgccctgagcccagtggggcacgttgggccatggcctgtgaatcatgcttttgggccctctcttgactgccatcagctctcagctatcctaggtcaactctctggcactcccatacctgctcctaactcactcacttagtaagatacttacacaggcttatttccatggctgatttagttaatcgcttttctccatggaaagaatcaaccactgaaggaagtgatctctgcagagtacgaatgcttcctggaacaaacttcccagccagatcccagcaggctgggatgacttgataatccgggaagagggacctgggagatggccatgccaaggaataaatccaaactagctcgcaggagttacagtttatatacaaagcagagacaaattaaccttttacaggtcatctgctgtgcatatggcattcaggacagcttccctgaaggtcagggctaatttagaaaaagtccctctgttcctgggacttctgtgctatgcaaggtcgttccctgaagccaagaatcccagtgcttccctggagtggctcagccccagccagtgtggagggagggagggtcttccttttagcggcctccaccccggcacagcctgggtgatgggggagggaggctgtcctctgtccttatctgtgccttgtgctggtaaccagagagaaatataacccttctccacctaaacctcctgagcatggtttatttattaagatctccaatgttttaaaccatgcgtcacctccagtgacttcatgacctccttttctgggcattgctgatgggtggagctcagacactgggaacagggtctgactgtagcagtgagcaacagaagtcaggtaaaatgctcaatttccagactttctattagcagatcatgccactgctttggggccttgttgtcatttacaaggtcatttttagtgacaagtctattcgactcaggttgaacgacctgatatgaagtctctctctccctttctttcagtgatttacttacaaaccaaccaaagcttcttactgatgtattccttaataagataaacacctgtgttgtatttattttctagatgctgttgtgaagtacaaaccaagcacttctccaaaacttttgcatttaaaattgtatgaaaggatgaagctccagtatctgactgaggagaggacatgggctttaacagttcctatcagaggggcataaattctatattgcatgccagcatcatcccctcactagatacacatttccttttttttatttagttaggttcacatttgaaggaaaataaagtctgttcacagagattgcaaaaaggtgaaacaagaacaatgaggatgctgctaattaaagatgtctaaaaacaaaagaacacacgtattatgcataaccaaagagattcaaaaatcctcctggtagaacatgttctcacttgtaagtgggagctgaatgatgagaacacagggacacatagagaagaacaacacacactggggcctacttcggggtggagggtgggagaaggaagaggatcaggaaaaataattaatgggtattaggcttaacacctgggtgatgaaataatctgtacaacaaacccccatgacacaagtttacctgtgtaaaaaacctgcacatgtacccctgaacttaaaataaaagttaaaaaaatcctcctggtagatatttcaatttctcacccagatttccagttctcctcttccttcaggcacatgccccattgaggtcaggcatggccatgagacttgctttggccaattaaatatgaacagagataacatgtgtcacctccaagtggaagcactaagaaggcgtttgtaattctcccatgctctcttcctctgccagagcagaccatgaagctgaaaatttggatgacagggttaaaagatggtgaagtctctatcctaggtcaccgagtccggaagattgaaaaggtagctcccaattcttccactccctgaacctatactcccttgccatataaattggagggcctctcccctttgattccgagcttagccagatgactgtcatcaaatccttccatttgccattaagacaactaacatgacccctaaggagagaagatgaagatgtttcaacactgaaaattagcaaataaaaatgtataagggagtctctattctgattattacaatcgcatttgagttattaagcttagtatttttcaacaccctaagttaaattatgataattaatcaacataacagcaaggaatgtactgttcattgaagtgtgaggggttttgaattcactgtaaagacaatgttttcataaaaactaagaattccattctatcctagattcctgtaatgtgctatgatggcaatgtatttcaactttgatttggatcttttaaatgcctctggtggtggtgtacagtaaccaacctctctagctaatcaataagctgagaaacaaaaacggtgtgtcaccgtgagggtttagttccaaattctgctctctataaatggataaaatgttgcttagtcaagaagtctgttaacatgtgtgttgtgcgtgtgtgcacccgcatgtgagggcatacagacatgtctaaaaaaggcaactatttataatccacatcggaacacagactatgctcctcacaattcttttccgaaagcagccaacacattttgagatatgccaacagtcattatccaaggatgtaagaacaggagcaccatgcatcacgcggacagtcgcctttccaggtaaatagcacagagcaagaaatcaacaccattagaaatgaagaactgcagtttcttggaggctaaatttaaattttgtcttttctacacaccaaatataagccaagaaattattcatatgcaaatatacatttcattgctacatatatattcttagtagaatcttcaagaaataggtcagagatacaacataactctcaagacattggaaagcaccaaaaggtcatgaaaacagggcttccattttccagattttagtttcagaatgtcagctatatatgcaatgctgaggtctctcacagatgcaaaatactactaccttgtttttagaagcagacgtaaaaccacaattttctcaaaaaagttaacacaatggctacagttacagtgccggtaactaatctctcttcatcagtcaacccaccaaaggatgtctgaatcaagccattataagccaatacaaaacacttatttcaggtttacttacaaaatagcatcagccttaagaatactaattctgaattatgatgaacacataaacggagacccgattccatctctgaaataaccttttcagaaggtgagcgtggtgtcctgcaccctggagacgcaaagcctacctgagacaagtgaaacagtgtctttctcccatgagacgacagtgatgtacgcctccaccgaggaggggataatgcacttgaagaccgcaacattgcctctcatggttttctggtcctccacacggactgtatagggctcccgtaaaactggaaggcagaaagaggacgtcagtaaggcacacggtcaacaggctcattctgagagtatctcactgtaatatatacactgcagcacacacacatcaattgcataacatatctttctggaaaacagttaagatgcctacatttcacgtctttcatcgcctgacttaagaaaacattcattcccttaacaatacatagctgggtaaggtggctcatgcctgtaatcccaccactttgggaggccaagatgggtagatcccttgtgcccaggagttcaagaccagactgggcaacatggcaacaccccatctctactaaaaatacaaaaaaattgctgggcatggtggtgtgtgattgtagtcccagctacttgggaggctgagatgagattacctgagcctgggaggttgaggctgcagtgagctataatcatatcactgcacccagcctgggtgaagaaaaaaaaatacactacactctataccaaggggccagagtataatcgaaaatagttaatagaccccctgaaggtatcatgagataggaaatagcttcatgaaagaaaagttactggctctgcaaagttatgatgatggcaaactgctattagtcctctaagggccgaggaagatttttttttctgactgcaaaaaatgaataaaaaattcaggcaaggcaatttttctgggaagccttgagaactctgagacaattaaaataatttttcattagtaaatttttaaatgacagttgcaaagcagtttgggaaacactgatcctgcttcccattgtttagggaaggatgttgattagacagcctgcccaaacactccaatgataggagcatcccagaaagactgcagagtggacttccacgtccttgatgtctaggctcagaggcagggtggtactggtgttcagaacctacctagcaggcccaactccctgggttcaaatccaagctcggccactccctgactgtggggcagtgagcaaatcctctcaccatctataccatggggatgatgttggtagcatctgccccctagggtgactgtggtgaatcagttaacgtaggtgaaaattcaacagtgtctgctagaagcaggttgggtaaggccacacttaccaatagccagagatggatccccagggttggggaagatctgtctccagggaagtaagacactgatgaatatagtcccaattagatgtgccagccttacttctttagagctttgttttcctcaaatttaaaatgagggcattgtggtgggaacctcttcaaggtctaaatcttataagtctatgattttctaagatacccacagagataacttattgtctaatcatctaaccacctcacttaaagaattaatcacttactggacaaatatgtgccatgaaaatggtttcaaaaggtactaacacaccaacaaagctaaaggtgaatttctcaagggaaatctcccagtaggcagaggtgagctctttagaagaggactgttaaggtcgggctaaccttgtgatatgctgagcatttttgtagtaaagcatgtctttcatgaaagccttcctctccagtttccatttttaacattagccgtttttccccaacttggagaatttcttcattattgtatctaaccagagagatttttccaagtattgaaatcttctgcgacccccatcactgtaatccccaagcggcatgaggtgaaggtccaggcagcaactccacacctcctgcaggaggtccactaggcaaaaattcagggcgcccaagagactgacctcagcaacaacatccttacaccgagaggagggaactgactttgtacagaaaggctcctgcataagtaaacctttgctgggagctgaggtctacggtaatagattagaaaaagactatgaagatataggcaaactaatcaaactcattggtgagaatctgggcatggtgagaagcagaagacagagaggagaagaggaggatggaggacagaggagaaagagggactggtcaacagagagagtctaccgtcacaggaatagtgcccctaagcaggggaatgatttcaatttaagctcctttgtctgtgtgatgcttgtttctttgcaataaaatcactctgtctccccaaaccttccgcagactctgcttcaaacattaatgactcaagtaggataatttttaatagaaatcaaggaaaggggtcaagttccatgtatcagacaggaaagtgagaagaaaagatgttcacctgtttaccgggagacacgggaaatgccttcccaccaggtgtacagcctacactagatgggatcacaggagccataaaaatatggggtgactgaccggggacattcccagtgttaccacccaatgtccagtgtcctaggaaacccctcagtcccagcacttacccacatatcatggagttttctcctctctagctacccactgccctcaccagtaccaggacaccttagtagtcacaattttaaacctgtgtgacttttgcttctccaacctccaggtcagtcccaagaagcccagatcttctcaaagcagggacagcactgtggtgatctgaaccccagctcgctcaaagggaatggggatcagaagaaaactgcacactccccatcccttctccttattcgattactcattccacaaagatagcctgtgcagtgagcctttaaaaaattatcttagaaaatacttggcacacaagaggtgttcaatacatattttgagactgaatatatagaaagacagagcttccattctgggagaacttctaatccttttacagaatatacatgtatgcacatttgaatttatagccactatctatagttttttaaaaaaatgcaaatcagggttttattaaagctcctaatctttgtaatagagcattgtttgttcctgaggcctccataacttaagacaccaacattgctgtctatggcgatatatctctcagagggccatgtgagtttcctgagcccatagtcagccccgaagacaggggtgcagccttgatcttcattctacatccaactactgctaactttgttgcagtaacagacactgggctagaaacctgagatgcaggcaaaaaaaaaaatacactttgttttaaatttgattgacatttgcattataagacagagtattatctaagtactgtgcttggtgtcataagttaggctctccccagagagcccagatcttctcaaagcagggacagcactgtggtgctctgaaccccagctcgctcagagagaacggggatcagaagaaaactgcacactccccatcccttctccttattcgaccccaaaaggaggagctgggttcaagcgactgagcaaggacacaatcccctgagaggcagggaaagtgtgagtagggcagggagggaagcagcaaagcaggtgtgtggtttcaggtgaagtcccagccacacctgacatgctcggtcatgcagaggagctgggatcccctgttgtagctgtctgtcattggcttagggctggcctcaggaggatggaactcccaggcatttcccactcttgtttctgtgaatggttccagtgcccaagcaatcctctgaaggctgcaggttcatgttcttagcaaccagcgcgcagatcttgggggatctgattcagggatgccagtagggtccactgcaatcattttagccttcattcagtaaaatctgtcatctttttagatcagaagaaaaaaaaatctctggtaatatgactttgaaacaaaatcaggcctatttatttttttaatcaaatattttcattgtgatataagagttgtacatattctggggtacatgtgatgttttcatacctgtataaaatgtataatcataaaatcagggtaattggaatatcaatcacttcaatcttttccctgtgttgggagcacagtaaatcttttttcttctagcaatttaaaaatatacaataaattattaactataatttccctactgtgccagcaaatgttagaacatattccttctatttaactgtatttttatacccctcagccaactactctttaacccctctcctcatccccttgcttcccagcctctggtatccaccattccactctccacctccataagatccacttttccagatcccatatgtgagtgaaaacatgtaatgtgtgtctgtctgagcctggcttaattcacttagcatagcaacctccagtttcatccatcattatattcttgttggatggagagtttgcaaatattaatagtctccccattctgcatgttgtctcttcaactttgctgatttttattttctttgctgtgcagagtttttctgcttgatgtaatcctatttgtctatttttgcttttgttgcctgtgcttttgaggccttaccccaaaaatctttgcccagactaattttctatagtgtttccctagtgttttctttcagtaatttcatagtttcaagacttagtttaagtattttgcccactttgagttgattttcatacacagttaaagacagggatctagtttcattcttttgcatatagatacccagttttgccaacactaatttttaaagagcttgccctttcctgaatgtgtgttcatggtacctttgtcaaaaatgatttgggtataagcgcatggacttatatttggattctctattctatcccattggtctatgtgtctgttttatgtcagtactatgctatagtatgccagtactacacctgtgttgtattctttgaaattagactgtgtgatacctacagctttgttctttttgctcaggattgctttagcatttcggagtcttttgtggtttcatacaaagttaaggatttttttttctatttctgtgaagaatgtcattggtagggatggccttgaatctgtagatcactttgagtagtatagatattttaacactattaattcttccaatcaacgagcatgaaataactttccattttgtgtgtgtgtgtcctcttcaatttctttcatacttctttatatttttagcatatctactataggtttttactttgtggttaccatgaagcttacgaaaagcatcttatagttataagaagttatttaaaactgaaatcaactttactttgattacacacacatggcttatttattgagcaagagatcacacggttggtctacattgacagcagcgaatgtgagaaaacattttaaatggtccattttcaaggcataataaatctaagcactggcagccagcctgcagatgtaacaaattgcatggctcatgcacctagaaggtcacgataagcaaacagaatgtagacgaggggtcagcccataaaagggaagaaagttttgttactgggaaatcaaaacttaagtggggaaggggattgggttataactttaaaagggggataatgaaacttaggcgatgtccaggaagattgtaactccatagtactcaatcaatgaggaactgggggagggacttgcttgctaggcaataaattacctgctctacctgccctgggtgtgcctgcctaacaggcgcctgatcttgcatcaaaagtcttgcttaggctgggtgcagtggctcacatctgtaatcccagcactttgtgaggccgaggtgggcagatcacctgaggtcaggagttcaagaccagcctggccaacatggtgaaaccccatttttactaaaaatacaaaaattagccaggcgtggtggcgcatgcctgtaatcccagctactagtgcggctgaggcaggagaatcacttgaacccgggaggcagaggttgcagtgagctgagattgcgccaatgcactccagcctgggcgacagagcgagaatccgtcttaaaaaaaaaaaaaaaaaaaaaaaaagagtcgcttctgctgttcttcgtgtctctgagtccattctttgcatctggatggctgtatgtgcgtttctcacatgaaatactcattttattgtacttcggagagattatgttttttacaagttgaagatttgtggaaaccctgcatcatgcaactctatcagcaccatttttccagcagcatgaactcactttgtgtctctgtgtcacattttggtaatgcttacaatatttcaaacttttaaaatcattatatctgttacggtgatcattgatcagtgatctttgatattactattgtaattgttttgcggagccacaaaccacatttacagaagatagcaaacttaatcaatacaggtcatatgtgctctgcccacctcactgacatgccattttccgtctttctccctctcctgaagcatccctttttttgagacacaacaatactgaaattaaatcaataaataaccctacagtggtctttaagtattcatgtgaaagaaatggtctcatatctcttactttaaatcaaaatctagaaatgattaaacttagtgatgaaggcatatcaaaagctaagacaggctgaaagctaggccttttgtgcatttagccgagttgtaaatgcataggaaaagttcttgaaggaaatgaaaagtgctacttcagcgaacaaatgataagaaagtgaaactaccttactggtggtgtggagaaaatttgagtagatagaagatctggagagatgattaaactagccacaacattgccttaagcgaaagcctaaatcaaactaagtccttagctctcttcaattccagggaggcttagaggggtgggaaagctgcagaagaaacactggaagctagcagaggttggctactgagatttaaagaaagaagcaatctttataacatacaaatgcatggtgaagcagcaagtgttgatggagaaactgcagcaggttatctagaagctccagctaatgtcaatgatgaaggtggctgccctaaacaatatattttcaatgtacagaagatatccttctattaaaagaaaatgccatccaggattttcatagctagagaggagaagtcaatgcctagcctcaatgcttcaaaaaacaagctgattcttgttaagggttaatgcagctgatgactaagatgaagtcaatgctcatttaccatttcaataattctaaaattatttcttagaattaattatgacaaatctactttgcctatgctctagaaataaaacaagaaggtctgggtcacagcacatcttcttatagcatgtcatgttgcacaggatagaacctccaggacgatgtagaatagaagtggtgagagcatacactttgatattgttcttcatttgggggtgaaaacatttcatctttgacaagtatgatgttcgctatagcaggattttcgtagttgctttttatcagattgaggaagttcctttctactgatggttttctgagagttcttttaatcattagtggatgttgggtttcatcaatgtttttctgtgtctgttgaaatgatcacatggtttacactgattaattttcaaatgtgaaactcaccttgcattatgaatataagcctttgtggtcataatgtattattccttttatatgttgttggattcaatttgttaaatttttagaatttttacatgtatagtcagaagagatacttgtctttagttttcttatgtcttgtttatgtattagggtaatgctaacttcataaaatgatttgggaaatactctctcctcaattttctggaagaatttgtttataatttttattctttctttctttctttttttttttttttgagatggagtctccctcactctgtcacacaggctggaatgcagtggcacaatcttggcttactgtaaccttcgcctcctgggttcaagcaattctcctgtctcagtctcccaagtagctgggactaaaggcatgtgtcaccacacttgactgatttttgtgtttctagtagagatggattttcaccatgttggccgggctggtcttgaactcctgacttcaagtgattctcctgccttggtctcccaaaagtgctgggattacaggcatgagccactgtgcctggccaaaattattatttctttcttaaaggattagtagaattcaatagtgaagccatttgagccaggaattttactgtagagaatttttaccaataaatttaaattctttaatagatatagggctattcagtttatctgtttttccttgagtgagtcttgatagtttgtgtttctcaaaaaatattttatttcatctacttttcttaatgttctcttagtatcattttaatacctgtagaagataaagtgacgttatctccctcattcttggtattagtcatttaccaactctctcacttttctggtgaaaaacacaccaattttaacaatttttttaaaagaacttttagtttcatagatttcctctattgtttctttctgttctataatttattgatctccattctgatcttcattgtttgctttctgcttatagttttagttttatcctctttttcagtttaaaatggatgctgagaccactatttaagacttttttaaaaatttctaatataagttttttagagcaataaaatctccctatttttttagtggcactccccaaattcatatatattgtgtgttcatttcttattcagttgaaaaaactttctaatttccttcttcaaatttttttctgaatttttttttttgacacagatcatttaaaagagtgctattcagtattcaggtacttggttatttctcagagatgttattgttagtgatttaatttcattatgatcaaacaacatattttatacaacttgaatttaaaacaaatttatctgagatttgttttgttgctctgagtatggtctatattagtaaatgtctgtgtgtctcagaagagaatttatattgtgctgttgttggatagaatgttctttatttaaaggtcaattacatcaaattgattgatagtgtcattcacgtgtttttttgttcttactgattttctgtctacttctaccaattattgaactaggagtattgaaatctccggctataatttttgatatgtctgattctcattgcagttctatccatttttactttatgtattttgaagttttgttgttgggtacataaacatttacaatagtcatatcctcttcacctcccccctttacattatgaaatgaactgctttagctctgagcacaggggatttttagggcagtgaaactgttctttatgatactgtaatggtgatacctgccattatgcatacaacttacaacatagagtgaaatttaatgtgaactatggacttcagttaataataatgtataaatacgagcttattgtcacaaatgtatcacactaatgcaagatgctctgagcaaacagtgtatttgtttggaaatacactttgcttaatattaatgtggctattctagctttctttcagtggtttactttaattaggttgatttgatttgatgaggatggtatatcatttttatccttttacttttaagctatttgtgcctttgtatttaaagaatgtttcttttaagcagtgttaaatccaatctggcaatttctgccttataattcaggttactggaacatttaaatttaatgtggatattgatacggttaggtttatcattttgctatttgatatgtattttttttttaccgtgtttcctttttcttatcattttcttctttgttttggattgaggattttttaatgattctattttttctcctttgtgggcttattagctataactctgttttgttattttagaggttgctttaggttttgtagtatacatttgtaacttatcaccatctatattcaggtgacattacacaacttcacatatagcaaaataacctccaatattacactcccatgtcttcactgtaggccttaatgctattgttgctataagttttacttctgcctatgttacaaactacctaagacattgttactatttttgtctaaatagccaattattttttaaaatattgcaattttttaaaaaatctgatttagatactcatgtagttaccattttcattgcagttctttcctttgagtagatctaagatttgatcaggtgtcatttttttcttctgattctagaacttcctttaagatttcttgtagtaggattcagctgatgataaattttctgctattttgtgtctgagaaagccttcatctcaccattattttataaatttacttccactcttgcctgtaatcctagcactttgggaggccaaggcagggcaacttcttgagcccaggagttagcgaccatcctgggcaacatagcgagattccatctctacaaaaataaaaataaaaatcagcctgatgtggcggcatgcacctctggtcccagctacttgggaggctgagatgggaggatcacttgagccagggaagctgaggctgcagtgagcgatgatcaccccactgcaccccagcctggttgacagagcaaggccctgtctcataaaacacacatatacacacatccacacacacacacacccaacagcaacaacaaaaatcctgtctactgtcattcttatctttgttcctttgtgtgtaatatgcctttcttctgtagctgcttttgatattttattattgcgctgagcaattttattatattatgatgtgcctttgtgcattttttcttcacgtgtcttgagcttggggtttgttgagctccttggatctgtgggtttatagttttcaacaaatttggaaaattttggcctgcatttttccacttctttttaaatttcaccatcccttcccttggggcttaatttgtcattaagcttcctgaagcatgttttaatttttttgaataaagcttgatttttttttagagcagttgtaggtttagagaaaagttcacagcaggttcccatattctccctcttgccacatcctttaatttctttcattattatcatcttgcattaatgtgatacatttgtgacaataaactcatatttatacattattattattaactaaagtccatagttcacactaagtttcactctatgttgtaagttctatgcataatggcaggtatcaccattacagtatcatacagaacagtttcactgccctaaaaaaatcccctgtgctccgtctgttcaaccctccctccctcctgactatcccctggaaactactgatctttctactgtctctctagtttatctcttccagaatgtcaagtaggtggaagggtatactatgttgcttttccagactggcttctttcacttagtaacaggcatttaaatttcccccatatcttttcatagcttgatagcacattttttctatcgctgactaatacttcattttatactataatttgtctaatgttaaagaaaaattgtagctgggccctgtggctcattcctgtaatcccaacactttgggaagctgaggcaggcagatggcttgagcccagaaatttgagaccggcctgggtaacatagtgagaataccctctacaaaatttttttttttaaagaattagccaggtgtggtgacttatgcctgtagccgcagctacttgggaggctgaggggaatcacctgagcccagaagttgaggctgcagtgagccacgatcccatcactgcactccgacctggacaagagagggagatgtcctctcaaaaatattaaagaacagaaaaaaatgttctaacacttattaaaaagataagattatattcatgtctgttccagtaggagtcatctatgatgactgcaacagggaagggtaattcaacttcatattcaacaaggataagtgagggtttatagccaatgaacacagtgaggggagcagtgggtggaaaattagaaagaggagacatcaagggatgaggattcttgctaaactggcctaacagattcttgctaaaatcaggccaaacatgtatacatcaaagatgggactggaagaacttgatcagatattaagagtgatcaagtatcaagagtaaggggatgatttagcaggattcttgctaaagctggggacaagagaccagatgtgaaaagctaaggttgagaactagttgagaggagggctcagaggagcctttccaaagttagtcaaggagagattctttatccccatccactcacatactaaacaacatctttgttgcttccatgttttggcaattaggaataaagttgctatacaaatttatgtgcagattttgatattctttatcccaaagcataaggcaagcataggacacatcttatttccagctccttaaggaatgctttcctctactgcctgaggtccagtcttgaaaatggttgcttcagatattttgtctgcatttttcgttgttttttttcagttggttgtattagtccattctcacactgctatgaagaaatacccaagactgggcaatttataaagaaaagaggtttaattaactcacagtttcaactgcctggggaggcctcaggaaacgtacaatcatggcataaggcacctcttcacagggtggcaggagagagaatgaatgcaagcaacggaagtgccagatgcttataaaaccatcagatctcgtgagactcactcactctcacgagaacagaatgggggaaacttaccccatgattcaatgaccttccactgggtccctcccaggacccatggggattatggggattatcattcaagatgagatttgggtgcggacatagagttaaaccctatcagcctcaggacactggtttttggttgtttcagataaaagggtaaatgtggctcccacacctccatctcggccacaagcaaaagtcctagtcaaatgttagaaagcagtttgtggccggggtcgctcatgcctgtaatcccagcactttgggaggccgaggtgggcagatcacgaggtcaggagatggagaccatcctggctaacacggtgaaaccccatctctactgaaaatacaaaaaagttagctgggtgtggtggcgggtgcctgtagtcccagctactctggaggctgggcaggaaaacggcgtgaacccgggaggtggagcttgcagtgagccgagatcgcgcgactgcactccagcctgggaaacagagcgagactccagtctcaaaaaaaaaaaaaaaagaaagaaagaaagaaagaaagcacagtctgctaaggagaaaacaatcatgagaaatcttctgacttgcccaggatcaggcggctcattgctacttgctctgtagcaaaggcagcctgggtaaggagcaatactgtctgaagtggcccacctgcattccagcccttagaacaggcaagaaaatatcttatgttaggactaggattgatgattaatgagacatgatgagtaaaccttccttcaattgctagcacccagacctaggtcaaaatttctgaaatttaagaatgagaatcccttgtgctgccaagggaaagattatgaagtcattctacctaatagcttattccaggaaaatccaaacaccaatctacagggatatttagacatttaggatgacctgatacagaagaggataccccgtgagtgagcagtcatcaccctcaaacctacccttcagctgtcaaagggtagcatttatgcccttcatctgtctttttgaacaagcttccagttctgtactcatatttacataaacaggatgaaaaaagattttcaagtatccagtgaacaacctaaaagattattataaccattatgtgttcacaataaaaagcaaaatgaaatcaggagagaaatttgatttgggtaatatgactgcccatcttatatgttcaaactgatacagtagtcatccatatgctggattcatagtccatagggtttcagatgtcaagaacgccagcacataaatagtaaaagcacaactgggtaggaagaggcaggtagcacagacgccagacaagatgatgcaatgtccatgctctaaaactttcagtgtcatgcaaaaacaatgaattctatgactaatttagaagatgatagttaaaacaggagtaagcatttcattcctttatctgacagaaaatccaaggcagacataatggattaatacgcacagatggagctgtttgaaattctaggtttccctataagtggtgttttgcagattataaatacgcttttataacacatcattaaaatgtgcagtcttcccagtaaaagtcattcactgtatctccctgtttgtcaggtttagaggtccctatacaaattgcattgtaattatttgacacatcaaattttcatatatcttgattaaagacaatcctttttttctttcttatgtgaattctcatgcaggtcttggaattcatgagcatgtcacaaagatcaaaatatagttgggaaaatgactagctagcagcatgagtcatagtctaatgtttgatggcttacatcaaagagatcatatgcaggaattcagaaacacctcatatttttctcatgttgtgatgtcttctaccagcacctactcacttactgaagaaattattgcaaagctcccccagctacctggtgtataagaaaaaaatcaaagtcacattctctttgccctgctattatattatgtcagtctacacaagtatttcagagctagacttaaaaaaattaaaatgctgtttgctaacaggagtctagctgtgagtttgttttgcagggctttgttaaatctatagaaccacacaatctgtcctgtatatatagcccttgatgtctgtgtatctcaggcagtattctttcctgggttgacttgtagcaatggtgattaaaaaaagacacaatatgttgttaaaaggaacatagcccattcaggatttatgtactgacaacatttcagcaacatgtgatacagtcaaaaatgttaaaatagcctttctatttcacaaggaaagcaaggatattagattgattctgtttccataacagtacatcttgatgctatggttttattccagctcaaccatttgtcatttttttctctctctttctcctcccctaggatggggtaggggaagggcaagtgggaaaaaaggaggggtggaagcaaacacattgggtttgagacactgaaaatttgaattagagtatcaaattagacaaaatataaggaggctgggatgttagaacttgccaacttgctaatcactgctttctttcaaggtttagttccaacaatgtaaggcactttgaaatctaaacaaggagaccttaaagaagtcatcagcaaggtcagaatgaactgatgatggggttttcattggttctctgctgtgatggcattttgctatgtgtcattgtcattatcctcccatcccaagcaggcacagaaaaaacaaagcccagagctgtactcaccagccttgatgtggacatcctgacttctaattttccctgaaggattttcagctgtgcaataataagtattatcatggattaaggtactgaagcttgaaggagggaaggggaaaatttggagagtgccgttggggtggacgtggcggatcccggggacatcgtagatctcctcgcccgtggctaggtaccatctgagagtcacaggagggatgcctgctgcggggcagggcaccagagtccccgtggtgctggcaaacactacctcttgcagagatgcattgacaaagtagaggctggagtgtaggtcttcactgaaaactgcaagaagacaacacagggatccataggtgagtaaaacatgcctttgacatttgcagttcaatgtctggcctcagaaagttatcctgaaaattaatcatgaggcgcaggctcaaataaaaccaaataattcaaattttctgaaaatgctgtgagcagacaggctgatactaaaaaataaggcaccatcctaatttcacattttgtacacaaactgttaagttatcctggatgttaatttttaatagattgtttttttgcctcatgccccaaaccctgttctctccccacactgaccaccattggactgtatatattttatattcacttattgtctatcttctgccactagagataagcctcatgaggacaaggtcttaatttactcccactattacctggagcatagagcccagctctcactggactctcagtaaagggaagctgaatgtgtgaatgcctagatcttgttgctgggatcaaattgctctctttactagcttcactgagggttattatgcaatgaaatttgccacatttttaattaaaattgcaaatcatatgtaaaacattttattttttattatactttaagttctgggatacatgtgcagaatgtgcaggtttgtcacataggtatacacgtgccgtggtggtttgctgcacccatcaacccgtcatctacattaggtatttctcctaatgctatccctcccctagttccccaaccccaacaggccccggtgtgtgatgttcccctccctgtgtccacgtgttctcattgttcaactcccacttatgagtgagaacacgcggtgtttgcttttctgttcctgtgttagtttgttgagaatgatggtttccagcttcatctacatccctgcaaaggatatgaactcatcgttttttatggctgcatagtattccatggtgtgtatgtgccacattttctttatccagtctatcattgatgggcatttgggttggttccaagtctttgctattgtgaatagtgccacaataaacatatgtgtgcatgtgtctttatagtacaataatttataatcttttgggtgtatacccagtaatgggattgctgggtcaactggtatttctggttctagatccttgaggaatctccacactgtcttccacaatggttgaactaatttacactcccaccaacagtgttaaagcgttcctatttctccacatcctctccagcatctgttgtttcctgactttttaatggtcaccattctaactggcatgagatggtatctcattgtggctttgatttgcatttctctaataccagtgatgatgagctttttttcacgtttgttggctgcataaatgtcttcttttgagaagagtctgtttatatcatttgcccactttttgatggggttttttttcttgtaaatttaagttctttgtagagtaaagcatgttaaaaaagcaccattatcagaaaatacaatgtcaaatcaacaatacacttttatttaaaataggacataacaataaagagaattttgacaaaagcatgactcaactccaccagcctacagtgtctgttttgatttttacatttcccttgtggtccacctgcctccatgccttatctatataattatatcatgttaaagtgtacatacgtaaaatgtaccatttttataactgtttaattcttttatacatcatctacattattccatggttctatacggacttcacaagtaaatatcagtgaatgcacaatttatacatattcttatgaactgtttttctgctcttttcatttaaattgtttctcttttcgcttctacaagtaaatatcatcaaatgtgttcatacacatttggctttttaattcatttaagggcctataacaagtgtttctggagtgttggttatgtgaagaaataaaacgtgacttccagaatttacaagttaaataaaagatttataaatataatgaaggcctacttgtcacacatctgagcttctccatgactttctaaagcaggtgcatacctagttacatatttgtaagagagaagagaagccccagatatttcgaatgaacttcactggtcagaagtgagaataacatttattgtatgcttcatagtatctcataccagacaaccttctaacactcgagatgaacaacagctccgctaggtaaacaaaggctccactttgcagacggtgacatggagattcacagggctgtcacttgaccaaggacacaggatacaggctgtcacttgagcaagaacgcagggctaggaggtggcagaactagattcagtctttctgatgaaggcttttgagatttttgttttctcatcttagaaccaaatgtggcataacagtcccccctcatttgtgtggggattacaggcagctctgtatagagtgggtctatggcctgtgcttccagatctagtctttctccgtggtgtggagctgaggggttacaggctcctgctatgtgctggggttgctactaagtctatgtgataaaatacatgagcccctcactttgcctgtagttaactgacatgatttggtaagaaagagatgaagaaattaacactatttacaaaggtgattggactcatcttataataataagatttaacctgctcactaaatgtgagggtagcgggtggtctccaccctgctgttaggaagcacagcatccaagcattggcacaaggctgaatagatgtggttgactctactcacagcatgttcttccctgctgccacttggtggacactgtggggctcccttcagatttcctctttagcgccaatgcaccctgccccaaagcagctggaaagatcctatgttgagtcctacactgggaaccagcccaagttacagggaactgccttgtctgaggcctgcagggaatgactggtcaaaggtggctccacaagcctggccccctcgtgttaagttgcaacaatgctgaaggtgcatcccacctgagaccgctatcatcagagctttgcagagaagcttctccctccactcattctgccttcctcacacccttgctgatgtctctcttgagaatacactcccaggaggccttctgcatgcaactcttcctctgagcatctcccttcaggtaactcaacaggagacatcaaatgaggctctgctagttaccctctacaaccatgtctttctgaaatgtttttctattttaaataaagtaatcagaaagtgccaactaacatcccatgtaagctccccaatagagcatgagcaataaataaaatacaccaagatggaagaaagtactaaatctggattatcactggattaaaacatttttacaagcaataattattacattgaataaggcaatgacacaactaagactctcaggctgttatgtttttgggaacccattgaatctggacagtgacagtgtgtagtttgttttatgaaaacatactcatgtaagaatctaacatttcaaggtgaaaccccgtctctactaaaaatacaaaaaattagccgggcacggtggcgggcgcctgtagtcccagctactcgggaggctgaggcaggagaatggcgtgaacccgggaagcggagcttgcagtgagccgagattgcgccactgcagtccgcagtccgacctgggcgacagagcgagactccgtctcaaaaaaaaaaaaaaaaaaaaaaaaaaagaatctaacatttatctattatataaacattttgatttttagttaaacttcacatattcaatgggctcatagccctaagcctaatgcctagcaagctgtgtgtgtttcgtaaatgctagttggtgcattcactgtccccatattttttcattttcccatctcataattcatgtggtatgtcaaacttctgttgataatataatgtaaccttttgaagtatttttggaatttctattttacaaaattacaactcttttaagtagattggaattacctctcacagtttaggaactgactgtatagaagttgagacagagagagagagagagagagagagaaggtggggggtacaggcgaaagcctttagcgaggtcctgatatagagagatgcttacaaactgtggccccccttccactatgaacaggaaagcctacatactgatgtgaattctgctcccctgtgagggacacacaatgtagatgtctccaaagtagatgggcccccgataagaccctctttctccttgatcaggggaagcatcaaaagctattgtcaatctgtgcgtctcaagaagtgtcttgttcaacaatgctggaaataacatggatgatctcacacttgaagacctacacctccttggggatgttggcagatgatatctacctgacaggtccactactggggtgagatctgagggtcactctggctgttaggccatatatggcaccaatgaaaactctaacttttcactggtgtcatataggatggaaatgttaccagggccaaaggcttcaattatagaaaagtttatcagtataaacacagtggtcaatgacacacaatcctgcagggcattgagacgtgtgttgtgtcacagttacattaggaaacttgctctcgtgtgcctatatggaatgtagacttctatttagtaaaaccaagaaggttaacccctaacctcactaaggagagatgggaaggattgctgtctttccttgcacaaatataccttagagtgcacatggcaaaacttcattctttaactaaggttaggaaatatatcaataaatatgttggtgtggggatgaggaagggcaagtgtaatgagattcctggcctactatagcctagaaagaaaacttcattaggaagaactgttagaaagttatgaggatggcatatggtggtcaagatttggtatggtggaatgagctcatgcattttagcactacatcttgttaagaaactaaatggtcatgtaaccagtcatttaaacactaagcaccaactttagattgtcacaataaaggaagaagtagggagcagaatagaggcagaagagacattaatctaataactagatgagctaataactaggcctgggcactctccgtggcttgctacccaagctgtctcgggacctatccgctgcattgtgacaaagtattcctcagctgccccagccatggctcaagtggtcccaggcctggcttaacttactgctctggaaggtactaatcataaactttggtggcatccatgttgtgttaattctgcaggtgcacagaatgcaaaagctgtggggcatggctttctccacctaaacttcaaagacttcccagaaagcctgcggccctgggcagagacttgttttagaggtggagccggcacaaagagtccccattagggcggtgctgagacgaattaatgggccagagctgcagcagagactgtccactagagtaatgcctagtggagccacggaagtggggctggccctgagatcccagaactgtagagctaccagcacataacatcagcctgggagagctgcagacataagactccaacccatgagagctgctgggtaaactgagcccaagagcccaacaaagccaccaaggcagcttttcctgaggccctggggacccaatccccaccccagtgttccccaggtgagggacatggaattaaaggggtttcttatccagctttaaacttaaggttgttttctctgttgggttttagatttacttgaaacctgttacctcttcctgcctctttctcctttttggaatgggaatgtccatcctgttcctgtctcaccatcgaattttggaattagatagcttgctttgattcatagctcatggctggagggaatttgcctctagatgaatcatgcctgagtctcactcatatctgattcagatgagactttggactttcaaactgatgctggaattacttaagacttttggggtactgggattcaatgaatgcattttgtatgttagaagtttcaggaggccagggcagaataccacgatttgaatgttcctgccaaaactcacgttgaaatttaatcaccagggtaatggtactgggaggtggaaactttaaaaggtgactcgtaagaggcagatccttcatgaatggattattgtcattatcacaggagtgagctccttataaaataatacattctgcctccattttctttctatcctgaacacttgcttctgtcttccatccttccacctaggatgaccttcacctgatggccttggacttctcagcctccagagccatgagccaaataaacttctgttgtttacaatttactcagtctgtgtattctgttttagtagcagaaaatgaaccaagacaacaattcacgaaagtttcactcttcacactcatacagaataggtgaaaccttttcacatcactattttagtttcattatatgcctgcctttattccggaaagtcagatctaggggaagctgtgtccatgagatttagcatcctccaggtatcttacttgaaacatccatcgtttttctcttggtctccatcactggcagaaaccaagagtttggcctccagggccagttggggctatggctaagctgggaagcacagtgaacaccaattgccaaaaggtggcagagaaaaatacattttgtacaagcgatagctcttacccacagagaagagaggcaggggtgttcatcaagtcgtaagtgttttatagttttctctcccaaccataactaaagtctttagcaatgcttcataagtcagaatatgaaaattattgctaactaagaaatcggttcagatcagaagcatagttaatagttcaacacggcagttttcaactcaaataaaaatgctgatagtagcactgtaattttacatttgagctttccaagaaactgacattaccccaaacatattgttaggaatgaggtaactgtcactcttcaaggctaattaattccaccaggattcttttattttttttccctacattatttttctatcaacccgactgtgggtaatttgaactaagcaaaatttggtcatatttgaatttatcctcttgtatcctaaaagtagtcttgttaagaatagcaagactttaaaaatgtaaatgtatacaagaaacattgcttaattaaatgtatagtttcttattgaaaatctcattccacaagccagcttgtgaaattatttaaatgactgcaggaaaaaaatgataaataaatgtttaatcctagcagttaaagagataagcgacctatgggggattactgtcacttctccttatatttttaaagaattttacattagtctttctccttcatgccacagggtttaataatgtaacataaactcattctctaagagacacatcatatggccacaggcaaaagaaaacccaaactatattccaacagcttttgtttcttccatctaagggaccatccatctgcctaaataatagcacttctttttatagagtgcctcctgctctttaatacagtaacatttgcttcctccagtaagggcagaggcaaccttaatgtgaattatgtgtgtgtgtgtgtgtgtgaaagttcctaaaaaataactgtgggttcaaaacagaaagctaaatgaaacattcagcacaatcttgtgaaattcagggttgaaaatcctggggtaccaacactaagggagctaatgggagggaccttggagaattgtttcttcagttgcagacttctcaatattttacatccctgtaacagacggcataaccaaggctccactgacaaacataaagaagagtgttacaccaaaaagaaaataaatcaatattttagcttttcttaaaattcaaacagggcagggtgaaaaggggagatgtgggaggaattttgcagtaggcagtgacacaagcattcactgatgcaataatatttattgagcacctactaggtaccaggtcttgtgtaagggcccagtaatgcaagatataacaagtcctggtactactgccaaggaaatttcagtctgaagggtactctagttcacatagtgaggtcaattataattctatttaccgaaggttgtgacagaaacattcacaaaatgcaacagaagcataagtgatagagaaactaatctgacctatgaaaaatggaaacaactttccagaggaggaaagaaaagtacattctaggcagaagtcttaaaaaatattaggacattgagttgtcccagtcaggagagaaataaaaaggtgctgggaagcaggaaattcaatgcacagctaaaagtgttgcacgattaggagagggagctacaggtttcttagattcatttatcttggaaacactcttcagcacctaccatgtatctggcactgtgccaagaccagcagacacactaataaccaaggcgtggaagggtgctgattataaagtcaagattgtaaagagtgtcaggtgccaagctaaaaagcatgcgcttagccctgcagacaataaggacaattaggcacatacccaggagaaatgaaaacatacatccacacaaaactgtgagcaaatgtttaaagcagcattatgtataatggccaatggtggaaacagcctacatgtctatcccctgaagaacaggtaagcaaaatgcggcttagccttacaatgggatatcactcagcaataaactagagtgaagaactggcacaagctacaatggggatgaccctcaattacagccacaaaaggccacatactgtatgactccattcgtatgaaatgtccagaagagggagatctgtagagacagaaagtcgactagtggcttacttatggttaggactgggtaacgggacaggataggagggtttcttttgaagtgatgaaaacctgctaaaattgattgtggtgaaggcaccttatctgtgaatatactaaaaaccactaaactgtatgctttaagtggattctttttatggtatctaaattatatttgaataaagctattttaaaaagtaggaagtcaatgaaagttttgacaatgaacaatcaatttcccaaattgaagtttgagaaagtaaacactgagtagacagggagagaagactgcaggcagaaagcctggctagactgctctgctgggagtctaggccagctgggcattggtggtgagaagggagaaaaaaggcctaattatggatatgtctgatatgatcctaccagcatcggtgggcagggatgtgggagcaaaaagagtgaagaaaataaaaaaagtcaataggaggcaaatgtaattgcttgcatacccagttgcacagttacactattacaaagagagcctacaagacagagctggttggtaaaggaaacaacatgtcagtttcactaacgtaaagagggcactgcccctgggccacccaatagcaaattggaaataggagtccaagaccctagagacatatttggcagccagggaaatttaagtctatcactgggtgagatattccaagaaaagtgttgcattagtttgttttcacactgctaataaagacatacccaagactgggcaatttacaagagaaaggtatttaattggacttacagttccacatggctagggaagccacaaaatcctggtggaaggcaaggaggagcaagtcacgtcttacatggttggcagcaggtaaagggagtgaacttgtgcaggaaaacttctaacaaccgtcagatctcgtgagacttactatcatgagaacagcacgggaatgacctgcccccacgattcaattacctcccactgggtccctcccaaaacatgtgggaattcaagatgagatttgggtgagggcacagccaaggcatatcaagtgtaaagaacaagaagagacaaaaaccagaagtaaatcctcagggatagggagtattttataaggtaggaaaatatctgacaaaagatttgtacccaaaatacataatgaactcctacacaccaatataaaaagatagtccaacaaaaatggacaaaagtgctgggtgcagtagctgatgcctgtaatcccagcacttttggaggccgaggtgtgtggctcgcttgagcccaggaattcaagatcagcctggggaacatagcaagactctctctaccaaaaattagctgggtgtggtggcatgctcctgtagtcccagctactcaggaggcaggggtaggaggatcacttgagccccagaattggaagttgcagtgagccgagatcgcaccactgcactccagcctgagcgacacagtgagaccttgtctccaaagaagaaaaacacacacacacacacacaaggtgtgaacagtcacttcacaaaggccaatatataaatggccaataagcacattaaaaagtgcttcaatgccactggtcattaagaaaaagtaaattaaaagtacagtggggtactactacacatccaccaaaataactacaatggaaaagacagaatatattgagggtcttaagaatgtggagcaacaagaccctcaaacaatgcaggtagtaatgtaaatcagtagttattgtggaaaattattagcctctactaaagggaacacatgtgtacactgtgactcaacaatttcactcctaagtatttatacaacaaaagcacatgcatatgtccatcaaaaaatacacgctggaatatctacagcagcaacacgttgtaacagtcacaaactgaaaacttaccaaatatcgatcaataataaaattgatacatcgtgatatattggcaccttgaatcactacatactgataacaatgaacaatctgcacataaaatattataaatcacacaactataatggtgaagaaaagcaaaaagacaccaaagggatttacactgtattgttccatttatatcaaacatcaaaataggaaaaactaatctatgatgttgagagtcagaataaagtttgcccgtgggggtggggtcaggtgcagagaatggaaagggccatgaggtggcatccaaggtgcaggctatgttctttttcttgatctgggtgctgggcacactgcatgtgtacacagtgatttgcatgtatgtaacatttcaattaaaaaattaaaagagtttaaagaaattggaaaaaaatcatgaaggagataaataggaaattaggagatcagtagctcaaaccctagagagtgatgtcttagaaacaaaaagacattttgagacgttaaccaacagttttcaacactgtcaattgcttcagagaggtcagaaaacatgagaactaaaacaggctatcgaatttgcaaattgggtacattaattttgaatggaaatgccatttgggttcaagttagctttattgatttcataggaatacgtgagtgggtatgcttactaaaatgaactgcttgtgtaaaggtcttccaaaatgaaagggaatataacttagccttaggtaaacatatctagaaagcataacatttagctgattctgagactccaaaatggttttttctttggataaatgcttagaaattcagtgtcatctcgatcagacaatcacaaatcagttaaatgatgggcttataatgacttggaaagcattccaaggcttctatgaagtgattccaagtcaggttattaaaatgtgctcatatgttatagcaattttgcctttaacgttaatatatttcactcattctatctactcccaagctgtgaaatgatgttgcaactgtcatcacttagaaatatgaaattctgtctctgtccatcataaaacaacaaacaaaaacacagaaacaagaactggatttactctatgtcttcactaaagtttcagacagtacagaaaaaaaaaaaatgaaagaaggaaacaaacaaagtggaccttatgagtggcccagcttacttcctgagtttctaagataattccaaaaggaggaaatttgaataaaacttggttatattgtggggttagggggaccaagtatgacacttgaggggactaaggctgctagaatttacaaagtggaaagaaggaagttatatagagagggagctccagagagcggaaggagcttccagttgatgagtccttaactgtgtgctgatatttgcatgcgtgtaagaaaactaccaaggttggattaggaacaccagaaagaagtgggtgaaaatctgtgaagctcacacaggggagaaaatagttcatgtttcaaccagcaaaagaggtaagaacttctaataaatagaacatcagattgagtattcagaaatgtatcacacagctgcaggggacaaattaatcataacaaaatttaaaagtgatcctagaagggaacaaactgagtctaagtaattgaactgcacaacaaaaaactttgatgataattaatagaaaccaacaatcaatcaataatataaaatttacaatgtctgtcattcaataaaaaattggacacaataagggaaatatggcatattattaggagtaaactattccacagaaagacacataaatgagagatgatacaatttgcaagcatggatattaacatcactcttataaatattctgtcaatatgtacaagacagtaggaaaaaggaagagctcattgatgagagaaatggagaaaatacaaacagccaagctgcaaataaaacagtcaaatggaccttctagagattcaaaatgtaatatatgaaatgaaagttagacaaataggattaatggcagattacacccttcagaagaaactgtcaatgaaccagaaaacagagcaattaaaactacccaaattgaaaaacaaactttaaaaaggcttaaaaacagtaaacacaaaactggtgagatgtgggccaatatcgtttggcctaatatacgtataattggagttctaggatgaaaatgagatacagaaaaaaaatcgaacaattaatatacagaagtttcaaactttaatgaacactagaacctcaactatccatcaaattcaacaaacaccaaacagaagcatgtagaaaaccacaacatgacacatgattaaattgttcaaatccaacataaagaaaaaaacttaaaggcaaccagattaaaaaataaatacatgttatatttagagaaacaaagataagaatgacagcagacttctcatcagaaacaacgcaaaacagaagacaaggggagagaaatttgaagcatttttttaaaaaaaagacaggaaagaaaaactgtcaacctaaagctctatatgcagaaaaattttcataaagacaaaataactttctagacattccaaagctgagaattcattgtcagtagactagcaatacaaaaatcgttaaaatctttcaggaagaaaagaaataatatcagatgcaaatttgtgacttcataaagaaatgaagagtgacaaaaatgttaagcatgtgggtgaatataaaatcatattttctcactttaaatcatcaaaagatacattactgttaaggcaataataatgcattgtgtggtttgtaacatatagataaaatgaataacaatattaacacaaaggcaggaggaaggaggaaataaaaatttattgttgtaaggtccttctataaattaagtggtattatttgaaagtaagccatgttactttgaagatggacattgtaaactctaaaagcaaccacttacaaagcaaaataaaaacaaaacttacatgttaatcctttaatgcaggtaaaattgacaatttaaaaaatactccattaatccaaaagaaggcaagaaagagaaaaataaaggaacagaggacagatagaaaaaatagggagcaattagcaagatgataggtttaaacgaaaccaaattgaccatcacattaaatataaattgcctaaacactcttaaaagtaaaacattgtcagattgaataaaaaataaatacctaactatacgctatccaggagaaattctattataaagaaactgatagaccaaaagtaaaaaaaatagaaaaaatataagctaacactactctaaagaaagtgggagtgattatattaatatcaaagtagattttagaataagaaatattactagggacagatggttattccctaatgataaagtggtcaattcatcaaggtgacataacaatcctaaatgtctatgtacctaataaaagagcttcagaggacatgaagcaaatctgctggaattaaagtgaaaaatataaaatccaaaaggagaactgagagctgggtctctctcgctctttttttttttttttagtgctaattaccattagggtaacgtaacagtgttttttgttgagatgtaggttgcattcttgaatgttggaggttaagaaactgtgagtagaaaaaatccaatgtcatctcacagctgtcatacactagggtctggccacgctggtctcctcagtgtcctaggtccccaatccccttccaactcggggtctgtgctggtactaggctcttagctggaacacttcaccctcctttatccaattaactcctactcattcattgaatgtcagctaaacaccaattccttagaatttattcccggtcttctacctttcatactagacaccgtgtcctacctttcagcttcttgcatcacactgtcatcaatgttttcatagctattttgcatgtgcaccccactccattgcaatctagaagaggggcagcatgcttcataggagatgatgcaatcttattcttagaggcagctggtgtgctggctaatacataatagaagccctcacattttttattgaatgcataaataaatgtttaaaagaaaaatattatggttttcatactacatataactaaagagattccttttaagaagtaacaatctgtattttatatacatcatctactataatctaaattccattatatagatatcaagggaccacaaggatgagtggctgacaaaaagaatttctgaggtgctataagaacacacttcgaagattttagctactttgtgtaagaatgttctttttatccaatatttgtacttattttgcaacaagaaggaaaaagcctgatttttgccatgggttttacaaagctctggagaaaaaaagtaaaaataaattagtgttttacccagaaaatgtctgagtattgtttgcaatccatttctagagtactacttccatatgtgtatagggaattcattttagagataaaagtctctccatccctttggatggattaaagtcactctcattaacattgctaggggttaagtgtacattttcagagaggaatatagaatctgtaatgaataatatgtatgtggtttactacgttccggcatttacattttaagctcaaaggtttcaaaaggcatgaaagtggctagcgatttggaaggagcagaagacccagtgagcattatgatcacaggcagtaaagcacatgaataaaccaaaatgatgtaaatggctccttaggattcggaagcataaaaactggggaacaagaatagaacaaacgaatgaagaaagagtacagagttatgtaaagaattacaaatgaagaaaatcagcagaaataacagagaaataaagataacatcacaataatgttaacagaattgctttctgcagattaagaggcaaagagttggagagagagggaaaaaattacaaaattgaatgtccaaaaacatggcaatgtgaaatagcaacaaaaaaacagtgaagcaacaataaagtaagattatcaaagggaaggggaggaggacgttaaccaaagccaactgaatcatttctcctatgattaaagaagaaaatgaattataaccagagactgactggtacctcagcataaaaatgtaaaatccaagttcggtaattaaacctttcactccagcattaagtgaaaacactgaagtgaaatgacaaaaagacataaattcttcttagtttcattgactaatacactgttgagcattattttcttttgctagaacttcactatgttcagaagtgcttcatttttcattttgctctgacctaaggacttacagaaatctaatgttttaagtaatttctttcttcatgtaacgcacaggtttaagtttcagaaacaaaataaatgaccattctcataaatgcaaatacaccctaagtcatgagtgatgacaatttttaaaaaaactttgaaagactctttaaggattgactccagtctaatctggtccctcgaatttaccagcctttccagggtttgctctgaatgagagactggctcactggcttcctctagtatgacttcttttggctttctccacaatgttaaatccattgccattggcatctcatgactgccagcatctcatctctcttcccctttgtccttagagtgtttgtaaatccctttatttccatgttaatgaagcttctgtggcaggatgaggaagcaatgacaaagtgtagatgtccagttgccttttcttatcagcaatgcctactgtcgccaaagcagtgatggaaaaaaaaacctgcgtccgggctccaggtatgaggtactcttctatcttcccagaggacattggggaatactgcatgaatgaaactcacctgactttaccatcccttgtactcataccacctgatccagttctgtatttttgcccttgcatatcaacagactgttcgtatatgtgactttattcattgccaaaacatttgtaccttgaatgcagcaaagggggcattgtcatccttgtaaaccgtgtgctcacacagcactgagtgtatggacaatgcaatcaacacttaaatgtaaccgaaggcagacctctgtggaggtggaaaaagcatttctttgtgagaaaaggtgccatcatttctggggttctctgtagttggaacctgctctcaggttctgacctaggagtgtggagaccaagggcctgccttttctggacctcagtgtgcagccatttataaagcaaggtgtgactgacctagaattccatactcaaagtatcaaacaagtaaacgaggacaattttagatcatgcaaagtcaaaattttgacctctcatgtacccttcttcaaaaagcaattaaaaaatgaattaaaaggttgcaaactcagaaagaacatacgatatccagaaaacagacggtacaacataggtgagaaacaaaaagaatttccagaataactgtgaacgataacagaacaacaaacatacagcagaaatcagtccagattaaagcagaaagaaggctcctggagagatgtttccaggaaaaaaataaacattcaagcacgctaatgcatctgaatgtattaagaagagtgtttagtccgttggagaatttggggaatgaattagtaacacatgcagtgaaaactaagtaaacaaagaagcaagtgattattaatcctaggaaaaacacaaagctgtaatagaaaaagtgttcatcatatactatgtggctcagctgtagctaatatttacatagtcataataatgtaaatcataaatattgatctaaccccaaatggtagtatcattatatagataaaatagaaaaagataagaaaagagggcattcacagtccataaaatcaaggtaaatccatatctaaacttgaaagattaagaatttcagtgtaaaaagataacttaaaaatatgggtctgaacatagaagagtcagctttaacaggaaaaaaaaaaatactcacagaaagcaaagtctgtaagtgagtgtgtttccagagagtttgtctaattccaatcatgatcagaaggagcccaaaccaaccctatgcggaacagtgccttccaagtggacgcagcacaatttgtctgattctctgctatggtttgaatgtttgcccccactcgaactcatgttgaaatttaatccccaatgtggcagtattgaggggtagagcctttaagaggttattgggtcatgtaggctctgccctcatgaatagatcaatccatgaatggattgatggagtaatggattaattgattagtgggtgggttgtcatggaagtgggactggtgactttataagaagaggaggagagatctgagctggcatacccagccccctcttctctgagtccccatcagcaaaaagaccctcaccaaatgtggcccttcaaccttggacttcttagcctccataattggaggaaatcaatatatcatttctctataataccagtgtcaggcattctgttacaaacaacaaaaaacaaaataagacattctcacctacatcagtcagctggagactaatgacgccccacaggctctcaatgatggaaaacacacgatgctgaaatctcgcctacagaggcttatttaggagtctcaaacacgcaagactttaaaaaatctgttgattggaaccctggttaaattattgtcctaatttccttgtccacttagctatgcccctgttctgggatccagtattcttaaaacttcaagaagttttcttgccttcctcctcatgtatgtgattcttctgcacatttgttagtacttcagaaaaaaattaataagagtcacataaggtatactcaaaaatatccttaaaatatgagagttttaatcgaagaagtaaaaagcatcattcttaacagttgcccaacccaaacatgtgggtgcttgtagaggtccctgttttcctcatatcttatattcacagcatcaataagtctcttagctgtaccctcaaaatataccctgcatctgccttgtgccatctcctctgccactccctggtccaatccaccatcacctctccctggtgcccaatgggtctctctgcttctaccctggtcccctacacacacactctcatccatcagctccatcagtgagagtgatccagttaagatggctcaggccatctctggcctctgttctgagcttttgaggaccccattctccaggtaaaagcctatcttcctacaggatccatcctcactgtttcttctctgatgtcatctcctaccaccctcccctggggatcccaccgcagccacactggcctccttgtcgtctctagaccacccctgcaggctcccacctctgggtctctgtacctgctctccctccacctgggatgtttttctcccagaaactccctggctcaccttttccagccttggctgtgccgtctccccctcagggatgcttcccctgactgcctggtaaagatggcggcacttccactactgcagcgccccctccgacccacgcctgcacttactccccatggccctcagcgtctttagtgcactcgatcatttacctatttgttatacttgcttcaactgtctgcctctaaacctatcctaaaattttggtccctaaaaagtaaatattttggttgattttattccctgatgtattcccaattcctacaatagtttctagcatgtagcaaagagtctcaacaaatatttaatacttcttgaacacaagactgttaggctaaattcaattaaatatcaataagtctcagtgacatatagtgttttaaaattaaacattcactataaatgattcttttttttttttattttgagacaacttttgctcttgttgcccaggctggagggcagtggtgcaatcttgactcactgcaacctccgtctcccgggttcaagcaaatctcctgcctcagcctcctgagtagctgggattacaggcacctacaaccacgcccggctaattttttgtatttttagtagagacggggttttatcatgttggccaggctggtctcgaactcctgacctcaggtgatccacctgcctcagcctcccaaagtgctgggattacaggcatgagccaccatgcctagcccactacaaatgattctgaatgccgcctctccatttgcacagcaccttaggcccttcccaagcattttcacccatcattgtcacatttaatcctatagatgtttattcttacagactgcactaggtgagaagtcagagctctagagaagagaaggaaattagttaccctggattccgtattgtgtgtcagcaaagcaccaagatgcccaagtgtgctccttcactcagtggtaatgcatctacacgtggcaatatttcaatctccactgacatgggtcgctagccccgtgtctgccaagaaaatatcaccaagtgcattatcaaactttatattcaaagctgtaactattgcttctgttcttggcatgattaaataattagcttttatggaatacacattatgtgctaggattatgctaagtaatctaaatacaaaaccttattttaatcctcaaactacacctcacaggctgctattgctgctatttttatgtcagagatgagaaaccatataaactttgaactctgtcgtgaggaacagagctgggatttggtgctaggttgtcagttaagcagtgactgtgtttgggctcagaaccctttaagaatgagaagaaagtgctgcactctgtcatgaacaaaaaggacacacacagttctgtttccagctccttaaaggtccaaatccccacttaaaacacctttgatctaaacattgctgcagattatttaaaattctcataataagatgtgcttgggctaggtatgccgtgtagtccttggagctcatctaaagccttataaactgaatcgtgttcctttgtaatcacttaacatttagatagattgaggttcagtaatcagatctttaagtcacagccacacaaaaacaagacaactctgctaacatgtctttggttataacatttatttcctgtttctttttttgttgtgttctataaaatcttaatgacctactttcatatacttcttccagaattaaaactatgatcaaaaattgaaaaaaccaaaccagaaaacatgatttttagagtggcttcctccaaagacatcctctaggccagatccatggtgaaaatgtagcacattcaacatacactgtggtattaatgctaatttacaactgcactacaaccaaatctcagttggaattcattaattttgacagtttgcctatcacactagaatgaattcgccgagtcacagaaacgtctctgaaaagagaagaatcacattctccttgctattaagtattcataacagactggagttgaacattctcaaggcaactagacataccattaataatcccagaacctatgaaatgtggcttgggcttcaccgagcagaaacccgtagccactcaggtctctttccttctatacctaatatgcaccagctgtgtaatgggctccgaagagcctccggggcgcaggaggtcataaaatagagtccattattccacattggaaatttgacttgatttggacttgacacttcatttggagaaatgtcctggaggcataattttttctggaagtttggggttggggtgagtggctggctgttgcaaatgaatcctgtggaacatttttaaacttaaaggaatgagacttcttaaatatttccttcatgatgacttctcaaaataaaattgagttgtaaagtctgaaagttattactggaatgttttaaattaaaccgacccaggatcgcagatttccaagagagagtgtgaagaccgtgccagtcacagcattttccaccgtttgataaaaatcaaatcttatctgtaaagacataactgttctaagattttataagcagaaaataacgcccatagcatctatcaaggatgccccagggccacaagcctggcacgctgtccagcccatgatgctgtctctataagaggccacctgatgtgatgtgctggaagactgttgccaaggcaacacaaactgcaagagaggagggggtgggagcaagaccccggactcacaataccccagatttcaaatcagtagatttagagtatttgcatattttggggcacctagagtacaatgttaacaatatagcacatgcaacttgctcaatgattactaaagcccaaaacagaaattgttacaaaatattatggaatgatcctgttaccatcagaaaaatgtttagcccatagaaagtaaacctatgaccccaagtcactacctaaagacctatttttatgtttgcatatttggaccaactctatgcatttaaaaacaaaataatttacatatttattgtttctctcatacttttaaagtatgaggccagtaaactagaatgtcagaggcaacaaatatgagcttcggtaaggaaggtttggtaataaggatgtgagccataagcatgactgttctgaagaagtatttaggaatgggtcaaagtcaaccttacagattctgaagtaacacaaaattaggctagtattaactttgttgtatttaatgttttcattagtcacttaaacacaggtagtatgataggagtgatagtgagaataatgttaacaagaagacaatttcactaaataccaggacagacactgcatgatctcatggaattccccatcaacccacaaggcagttgcaatcatggtcctcatgataaggaggggaaagttgaggctatagctcatggggcggtgagtatactagtttgctagggcttctgtaacaaaataccataagccaggtggcttaaacaacagaaatattttttttcatggttctggaggttagaagttcaagtttgcagtatccacagggttggtttgttctgaggcttctctccttggtttgtagaaagtgtcttctcaatgtatgttcacattcccctttgtgtgtgtgtcctaatttcctcttcttataaggatatcagtcatatttaatgaaggcccatcttacaggccacattttaacttaattacctccttcccactgcacccccccccccgccccccgggtgagagtcttgctctttcacccaggctggagtgcaatggtgcgatctcagctcactgcaacctctgcctcccgggttcaagtgattctcctgcctcagcctcctgagcagatgggattacaggtgtgcaccacatctggctaattttttgtatttttagtagagacagggttttatcacgttggcccggctggtctcaaactcctgacctcatgatccacctgctttggcctcctaaagtgctgggattacaggcaggagccaccacaccaggcctgcttaattacctctttaaaagccccatctccacatacaatcaccttctgaggtcagtggttaaggcttcaacatagtttttgggggataccattcaacccctaacagagggaaacaaggatggtagaggaaccagggaccataatatgggacaaatgtgatagaattctgaagattctgcaatgactgctgtgggcaggaggatgaaatctattatatcaccctaggaccctcccttcctttaagaatgaagttaaagagaggcagatgccaccaccatgtaaggcagaacattctaacaattagaactgcccaacattgaacatactgaaatgttttcaaggagaatggtgtattggagatgccaagaaccttgaaggttgactcagcaatatctagtctcttactcattccaattaagagtcatgaaatcacaagaagaatgcatgtttctctgccttagaggagatacactgattcaataacttcatctccttggaggctccttgcctgactgatgtggacaaggtcctctaattaatcacacattagctctgattcctaaaatagctcatacaattattgaggcaatttcaagtgagcatgctttgcaaaataagttacttttgcccctatactagtcctaattagctacttgtatcataaaactagaaaagtctagcctgaatccaagacaaatgcatacaaatgatgaatatgaaacactttttgagaggacttaaaatgtgaagaaagcaatatatgtgactattatcaccatttaatggtactttgtgcgagtcctgggcttggagccagcaccacggatatgatgatcacttgctattttttctactatttcagagtctctgcttttctatgctgggtaagatccatgtgattggcaggtcagacgatgcataaagtgatttgaggcaattacagcgacagttaaagattaatatgggaaaatactctcatctatttttttcttcctgtatctgagaaactttctctaaaatcattaccttcctgacctatacaaaagaggccccaggtatggcaaactgtgccaggcactgggagggtgcagacatgcatgcaggtgctggaggggcaaaaggccaggtagttgctgcactcgtaaataacccactggagaggcacttacagggaggcaggctggagacaagtgccaggggaggtatgaaccaggagcttggaaagaacagaggagcctgctggatactgactgatgggactgaggaggttgctgcctgcagtttcttttgcggtttcaattccctactcccagtctactttttggtgagacctcacattggagaagcggaattactccactgggggtaattttgccctccctagggaaaattagcaatgtttggagatactgttgattgtcatgagggagggtttggggagtgctatgccatctaatgagtagaggccagggatgtggccaaacatcccactgtgtgtgggacagtccctcccattgaagaaccatccaacccaaaatgtcaataggccgctgctgagaaaccttgcctctgagcatggcacccatagactgtgggtcctgctctccctctggcccatgagtgacttatcagagaggtgagtttgggaagagaaagtgacacgcctccttttcttctcccctctagcctccttgacctcaggggccatgcccactgctctgctctgctccactctccccatgttaagttgcagcaagaccctgcttgtggttgggggaagggctccaggggcctggcttggtttggttctggggtttaggattagcaaggccattgctgccacccgtcagcaccacattgtcaagctcagactttgtcataaacagatgatatttgatctccacctgacccctctctatatctttctgttaattgattccaaatataggcagggagctggggtgtcttggcatccgtaaaccccgacatcacttactgttgaatcttaaacagatgatgggccctaacttaattatacaaatgtcagtccttaataaatgataagcagagtaagccctgtgaggattaacttagatgtgcattagatgcgatgtggggtcatctagaaatcggagtcaccccaagaaacgctaaatgttgtcaaaagatgacactgagagtctccaatccaaggaaattttcacctgaagctttccactttaacagcatctacagagatcaagctacggggctacaagaggagagcaggaggaagataagaaaaggggcacgctgcttcctcttcccaaacccatctctcagataagtcactcatgggccagagggagagaaggacccacagcacatgggtgccatgcttggatgcagggagccttgaaaaatacttttaaaaatattcaagagccaccttgagaaaggcctctttaagagacaaaggggccagagcttagagtcaagccatgcatacacaaaggacagaaaggtcttccatccaacctgtgtaaatcactgcactttcttctatcagggtgagcctcaatctgcttcttcgaatgtaaatccaattgtcggagaggtctacagataatgtttaccaagcagcctcttaggaaaaattcaactgggacctccatcccaccattccagccagagtttcaatatggctcgttcacacttgatttccacacccttcttttcagttaatacccttttttccttctaatgttgtatgaaaatgtagactctgagggttgttttcctgcttgtttaatacgtgcagtctctaccgtccctcagctttgtcagtccaccttcttgggttctgaatgttctcatgtatttatgtagacaaacgtgaatgtgcttttggaagagaagagagtagacaaagtaagaagagaatcttggattttgacttgttattgtcacaaaacagaaatgctggttggttcaatatttaaactggtcaactattcacaaatgaatttttaaaaaattgctaaagcattgagagataaattagcaaaggaattcattactctctgttctctttgcctgtacatatatgttatttgcatgtatcacactgagggtactgatccacgtgtttttctcctccagttgatttaaagttccaaatgggtaagtactgcatcctattatgcttgcatttctaacacctagtacggcactgatacaagctagatgactatttgtgtttactgaattaaattccattcaaaagatacatgagcaggcaagtagcaaggaggaaatacaactagttaaggaacgtatacaatttacagcaattaaggaactgttacaaactgccacagtgtttaaaacacacttgctttcatctgaaatgagtgtgtgcatgttttagaaagcaagttggctataggtgtcaagatcccaaaaaaaggctgcaaactcttgcccagtatttccacttttgggggcctattttgtaatacaaatatttaccatttgtgcagtacccacctacattccagacacactgtgctaagagatttgaaatgtcattgcatcctttagccctcaaagaacaaccaccagcaccttatagggtagagattagtcctattttaagaaggaggacagatattaactaatgtatgaaagatcacaaaggccacatggctagaaagtgacagagtcatgattcaaacccaaatctgttgcattctgcactattttttatttacagcatttctgataccaaatgggcagacttttttctcacaccaaccaattctctctggaagagcaaatgcatatcctacatttcagatcagttctgacactcactacccagaggtagtgcagacttccccacccccagcttaagggctccattccccgagattgccctcacttctgatgccaggtgcaagtagctcatccccaggctacccacacttcagtccaacttgaatacaaagtcaaggggaacctatgaatctcccctttcagttttcataatttgctagaactgctcacaaaactcaggaaatcactttacttagtattatcagtttcaaataaaggatgtaactcagaaatagccaaatgtgaggagagatgcatagggcaaggtatggggaaagggacacagagcccctactccctccctggacgcatcaccctctcttcactcaaggatatttacccacccaggagctctcctctgaagcccatcatttagggggctttctggtggttctattacataggcttgattgatgacatcattggccattggtaactgaactcaacttccagctcctcttctctctccaaaagtcagggggtaagctcatgggggccgtgggtatattagtttgctagggctgtaacgaaatatcacaggctgggcagctcaaacaacagaaatgtatcttgtcatggttctggaggttagaagttcaagatcacagtatccacagggttgatttcttctgaggcttccccaattgtgaccaaccctgtcactgtgacttggtctttttggtgtgcagccccccatcctgaaggtatctagggcctccaaccacctcattagaacaaaagaggcttccttcacacttgtcattcaggacatctcaagggttttaggagctcctgtgtcaagaaccagggacaaagaccaaatatctttctatgatgtcacagattgtcaagcccaagcttctttcttctataacatatactgaagttacaatcttaaatagcatagggttttttttgcaccaagttattctttttaattttacttaaaaacccttatagaattgaaaattatataactactccacaagaagaagatagtttattgtggaactttagttttatggaatattatggatcaaaaattacatttaaaaagaccgtgaaacactatagaaaatacttaagataaaatgttaagcagaaagcaaaattacagtcacacagtgatttcaatcagaaagcaagttgatgctacggaacaaatactgtaaggaagattctagaattatgggagttaggacaatagacaatattttcctttattctaatttcttatttttactaatggattgctttactagtgaatttcttgaattctgactcttggttataaaataaaaggcaggctttaatttcactgtaaggcagaaatgatacatattataggatcacaagtgtatatatataaaaaatagagacacacagctttataaggaaatacatcaacattttacccagttactggagaggtttgcttttaaaaactcagcaaccggccggacagtggctcacgcctgtaatgccagcattttaggaggccgaagcaggtggatcacctgaggtcaggagtttgataccagcctggccaacatggtgaatccccatctctactaaaaaaaatacaaaaattagctgggcatagtggcaggtgcctataatcccagctactcgggaggctgaggcaggagaatcacttgaaccaagggggcaaaggttgcagtgagccgagattgcaccacttaactccagcctaggcaaaagagcaaaactccatctcaaaaacactcagcaacctgtctgggttcatgtgtcatgactatcaggtgattatagggctgatgacactaagccacagggagaggaacacaatctccgcaggcagaaagagcatctcattctctgctggctttccagagcctggccacatccagcatccagctgacctcagaaggggctcttgagtgggttctgggctcccagtcttccagcccatatcaaggtgaggtgcagccttacctcctgtcatgcagaaaccaccttctttttctgaaggcacagtcaataaaatgatcctcccattcaagtctccctttctgaccacactttagtctgagaggtagctctcatttcaggggagtgatagccttcaagggatgctgtggctcctactagtgggaggcatatgtttcattcatgtgaaatgcatttcacgacagtcttggcaaagagaagggtctgctctgttatgtaccccctccccgtaagtagcaatagttgattgtatttgcttgatattttacatcagaagaacaattagtttcttgcttttgagaggttaccaaataaggttttaaaaattttaccaagaaactaaattaaattaaaatgcacaacaggttgcaggtagaccatgccaatgcatgaaattctaactcttgctcttttcctaaagcaaacagtgggaaagagttgcatcagggacccagagctggttctgtaaccacttaattgtaatcgcatcttcttctgcccttcattaaggacaatcctaactgttgtaacaaataaaccccagaatttcagtggtccaagctaacaggcatttacatcttgcttaggagtcacatgaaggtcaccccagtagtgttcatgattggtgggtgcccttcctctacacaacaattcaggaaccttggttcttgccttttggagacctctcatgtcctctatcccagtgtttttcaaagtggaggtcaattagaatcacctagagtgattgttcaaagacagattgcggggccccaccccagagaatctgattcagtaggtcaggaatgggccccaggttttgcgcatctcacaaatcatcgagtgacgttgatgctgccagtcaggggaccacacttggagaagcaaagtcctagaaccagatagcagagaatgcagagaaacacacttcctgcttcactaccaaggcttggaaggtgcatcacttcaactcgccatccctcagcaggggcgagtcacacggacaatccccaacaaggagagggatggaaaccacagcctgtgtctgggcagctgcttcccagctccaaccctgcaggaagaagggggagcatgagttctggtggggagtgcaccatttctgctagcgtccagtgatgcttttacagagctggctgtccttcccatggatcatcatgttccttttctccagattttaatgtggtattatttgtactgagactaaaggagaggattatagtcttatcttgtcaccattcttaatttcagccataggcaaagaggaaagaacaaggacaaccaaacctagacaggcgacaagaggacaatggcaggagcactgtctgcagcaatgctggggggaggtgggggccatgcccttgaggagtcggacagagaaatccacctgctcagggaaggggcagccccagagaggctggtccagcaaaaggatgtattctttgacaacaactttcttgttgctggggctgccataacaaagcactacagatgagtggcttaaacaactgaaatttagttctcacagtcctagatgctagaagtccaggaccaagttgtctgcaggattggctcttcctggggcctctctctttcctgtgtcttcacagggctatccctctgtgtgagtctttgtcctaatctcctcttcttataaggatgccagtcagactgcattagagccaaacttaatgacattattttaacttcatcacctcgttaaagactctatctccaaatccagtcacatcccgaggtactgggggttaggaattcaacatataatttttttaaaagtacagtttggcccataaccctggggataaactgtagttttaacttcccgaaatcagttaaaacttagagaattagtttttttttttttttcccccagaaaagaaattatctcctgattctggcaggcagttcagtgtcagtggcttctttcactttacagtttccagaaatgattttcaatattcagtccatcatcacaagtggaaatgtccattgggaaaggccacctctagatgatgcaggtgtaattttttttttttttttttttttttttttttttgccaacatttaaaccaagagctacagcaaacccttgctaactcctcacctgggaacatgtgacaacacctgtatgtgggcagaggaaatgcctggagctgacaaccctttaaagcaactgctagaaagcgcctaagacagtgctctgtaaattttgacacaaataaaatgtacaactcctttgaggataaaaaactctaaatttaatacagaagtcttcttcgagatttgaaatgtgaagtttcaaatacagttagctttgagccgtgccaatccaagcatggcaggttttactgcagccactttgcaaagctaaggggagatgaggagatagtttggccagaatattaaagccatatattcagtccctgccagacaaactaacggcagcccaggtaaagagggcagagaattgtccacagcatttgctgaccccatgtgcctcctcccccaatatgtttcccacacattagagccattgggaataaaaagctcttctttaaaattcaaaacttccatggagcatcaagccttatttacatttgagtgcaaattactttaatcatataattttcagcatttgttgagtgctgctgtgtatttcaagaatgtacaatttcattttggataaagtgaatggaagggaagtttaggatccatctggaaggagtcaaggtctttgacccaagtaaggcaggctaacaaccataggctttgaggtggtagacacactggggctgagaggaggactcagaaggacagggaggatggcaagtgtgaagtgactactttgaaatgcctggaggcactgagataagtggcacagttctgaaatatatctgctgtgatttacaaaggttttagtggaagtaacagaagttgataatgatgctaagctcagaagatctcagattggtattatcctccaactctaggttaggcagcttatagtctctcaaactgattgacaatatcttagctaggtaactactgtgtggcatgcagaaggacaaaggctgttacacttactcagaatttagtgggggcataggaataagatgagaacaccaaggccctcttatggaagattaacctgaagtcagtgcagaaaaagtgactggaaatggagaaagaggatgaacacaaaatagtgagagtggtctctggttttctaaagcatgagactctgacatgctgaaaagatcaagtctagcttgggcaatgatttacttccttggttttctagtttttcagctaaaaaactgacacttaaaaatgtctacagtgaaatgctgttggacagaagggatacaattatatatttaaaatggacaaatgggtgcttaatatctttcatattcacatgttaataaaacatgtgaatgcacatgcatgcactcttccagaatcactctaccaactgttttccacctatgcacactaaaggaacttatcttctctgctgtcttcctgaatagcagttctcaaaccatggttccccataccaacaacatcagccttacctgagtgattactagaaatgcaatatctcagcccccaaactcagagtgacagagtaagaaaagtcacctgtgtgtttaacaagtccactgggtaaatttaatgcatgaagtctgagaaccactcttccagactagcaggttctagctacctggctgcacggtagattcacctggatacttcttagaaaagcagtaatactgcagccccatccagatgaaataaatcagaatgtctgtcaataggatctgggctgagatttttattttttaaaatttccaccaggtgattcgaatgagcagctcagtatactgacctgagtaactccagatgaggtgttacttagtgttcttgtattgactattcctatatgttcattccttcatttccttaaatgagaatttctactgtatgccaagaactgcagtaggtgctgagaatacaagatagatagagatcacacatttctagagtttttagtctggtgggcatcagaaaaagcccaccacgtacagccacacaagttgtgcactggccaacttcaatgggcacccttcgtatctttatgtacaacctagacagtcacatgcgacatctgaggttgaagtccaaggtaaccttggcattttaagatggagaatatataattccaagcagctttagcctttgtcactggtactgccaaatcctgaacaggaggtcccagcagaactaaggacagtgaattgatttctgattacttcactatgcagctcatttcccaatttctttttctggtagctcattattggtgtagctcatagacatgcaactaatttttgtatgttgatttttgtatcctgcaactttaatgaatttgtttaaagatggagaaaggggtcaggagccaaggaatatgaggagcaccactgtagggctggagaagccaagggaatgggttctcttctacagactctgaaaggacatggtcctactgacacactgattttcatccagtgaaagtgattttgtacttctgtccttcagagttgcaagagaataaatgtatgttgttttaagccactacgtttgtgataatttgtgacagcagcaatataaaactgatacatatacacaaataaagaaaatccagaaaacagagtagaggtttgagaaagcagttaagggcagctgaaatttaatgatctccctttagtgggccagggtctgtgctggttactttgaatggattacgtcctatccttacaacagttgtttgagattgtcatcatcatcaccagattcattgttactgttattgccatcttcactgtcatgatcatcattgccattattgtcaatatcatcatcatccttttaattaacattttcatcattatttttattttaaagatgaggaaatacaattatcaaaaaagttaagcagtatcccctaaattacccacctggcaagcggtagtcagagtttgaatgcctctgtctcaaaagtacaatttccaaaaggtacttttcactaaacaaatttatacttacacttactttactgaagaagacttctgcattgagatataacattccactctaattggagctcagaagactttcatttcatgatctttatggcctgaatacagagtggctgaatcaaccactttgaagagctacagaacagattttattgacggcaactagcaaaaagcagtacatcccacaaatgaatgcagcagtgctcccacagacatggttcatatagaaattcacatggtaaaataccactaatagactccccattcaataccatcttgcccaaaataaattgtttctgcatcatcaactcctggcaacaactttgctatatctgagttgtcatttctcacaataatggccttttattccacttggggcctgtcacctggaacaaataaggtctttacaaggtcccagaaaatgagaaaatgttctccataaattatatttttctgagcttattccccactctgacataatacaagaggttaacctgctagagatgtcgaatttcacaccccaaaacatgcagtgaggatctgcttatactagaagaaaaaaacaatcaaatgtatattttaaaaaattaaaatttgagataaagaagtacatttaaaaaaaaattttgtgatacaagagagttattctgataccatgtttctgtctggtcaacagttctcaggatctttcacaagtccttgatctgaggaattctccctatcatttctcaaaatttttctttgttctcatgatgtaaataggtcaaaatttcttataatcaaatctgctgaccaatagatctaaatacaattctataaaaagtaacagtaattatgaaggagaaacatgagcaagattgcagaatagaagacaccctgacattatttcctccacaaacatacaactggaaactattaaaagacaagaataccaccatgaattcaccagaacttggggagaagtggagaaacccactaggccataataactaagaaaaatggtcatttcagactgtgccactctcttctccaggcttgtataatgccactcacagagaattgacacagactcatggtttctaaggtgggaagatggaattggaggtggatgtttgatccccctaccagtatgggaatcttcatgggaagcccactcaggtctcactgcacaggaacccctgggagagctaggagggctgaactacctggggtgaactggggacaaaaagtgggggtgctgatcacttggtgctggaatcttggagctccaatcagcagggatgcagatgtcatactgaggagaccggccagcactatagtgctgcaggaagcatgatcggcaggaaggtctgaatctctggccagacttcccacaaagctcaggtgctcatgtggagtcttcccctgacctggaaacaactgagtttggaaattaagttcctttggaaattaagttccagtacgtatttaagtctttcccagaccaggaaacaatagtagagtagcaatttagttctagtccagtgtttaagttccagtgctcactataagtgttccctagactgggaaacaatggcagggcagtgattaagtcccaatatcaagtagtagaggtccaacactaataacaccagcagaagctggaagagtggctttctcttcaaatatgcaggcatcatcataaaacacgcaaaaattgtttaaaaaaaacaaaacaacaacaaaaacaatctcagggaaatatgatgccaccaaaagaaacaaacaaaactccaataatggacccagaagaattaaatatctatcaaatgtctgagaaagaattcagaataatcctctttaatttcagggagtcacaagaaaatgtggatggaaaatgcagtgaaattttgaaagaatttgagaaatttagcaagtaaatagaaacactttttaaaaatccaaatagaaatcctaagaataaagaatacaataactgaacttattgaaatttatgaaaagcttattcgaaatcttcaatagcagacttaaagaacccacaacctcaaagacagaacatataaaattacccaatcagaggagaaaaatctttaaaaaaagattgaagaaggcctatgagaattatgagatactatcaggcaaactaacctctatataatagtagttccccaggagataaaagagaaaaagttctagaaagcatgtttaaggaaataatcgctaagatattcctaaatctggagaaaaaggacagtatccaagtataaaaagctcagagatcaccaatcaaattcaacccaaagagaaattaaccaaggcacagcatcaaattatcaaaaagcaaagataaagaagaaatactcaaagcagcaagagaaagaaaacatatcacattcacctgagccccagtgcaagtttcagcagatttctcaacagatacactgcaggccagaagagattgggatgatatattcaaagtgctgaagggaaagaaccttgtagccaagaatagttcacatggaaaatgtatccttcaaacacaatggagagataaagactttcccagacaaggaaaagctgaggaaattcatcaacatcagatctgtcttacaagaaatgctgacaagagttcttcatctgaaagaaaagggtgctaatttgtaacaagaaaagatctaacggtataaaattcactggtaaaagtaagaatacagacaaatttagaatactataatattgtaattgtggaacgtaaaccacttggatcttaagtatgaagactaaagaaacaattattaaagatagtaattacaacaattagttaagagttaatataaaaagatgtaaattgaaacatcaaaaataaaaatgaacgtgtgtgggatggtgttaaatgtagtttgtttttcttgctttaatttgcagtcaaagttaagttgttaatcagtttaagataacttgttttaactataacatgattttaagcatcatggtatttacaaagcaaaaacttataatagatacactaaaaataatgagcatgaaatcaaaacatactactagaaaaaaaaaatctctcaaggaaaacaataagagatgaaacaaggtagaaaggatctataaaacaaccagaaaacaagtaacaaaatggtagtagtaaagccccacctaacaataataaccttaaatgcaaatgaattaaaatctccaattaagagacatagagtgactgaatggatttttaaaaatgcccaattatatgctgtctacaagagatctttcacctataaaaacatgcacagactaaagagatggaaaaaagatattccaaacaaattgaagcaaaaaaaaaaagcaggaataacaatatttatatcagataaaatagactttaggtcaagaatggtaaaaaataaacaaaaagaccatgatataatgacaaagggatcaatacagaaagagaacattacaattgtaaatatgtatgcacccaaaactgggactctcaatatttgagaccctcaaatatgtaaggaaaacattaatagatctgaaaggtctgtagattgactataatacaataagagtagggaactttaatacccctactttcagcaatggaaaggttatccagacagaaaaccaacaaagagacgttggatttaaacagccttctagatcaaatgaatccaacagacatttacagaactttccacccaatagattcagaatacacatttttctcaacaagacatgatattttctccaggatagattatgaaagtcacaaaacaagtcttagaaattttttaaaaatcaaaatcatatgtgtcttttctgaccaccatggaataaaactaaaaatcaataacagaagaaatgttcaaaactgtaaaacttcatggaaattaagcaacacgctcctgagcaacagaggagttagtgaagaaatcaaaaataaaatttaaaaatttctcgatcaaatgaaaatatgcacacaacataccaaaacctatgggatatagtaaaagcagttctaagagggaattttactgtgataaatgcctacatccaaaatgtagagagatctcaaataaaaaatccaatgtcacaactcaagaaattagaaaagaaggacaaactgaaccccaaattagaaggggaaaaataacaaaaatcagagcagaaataaacaaaatagaggttttaaaaacaatacaaaagatcaagaaaacaaggaggtatttttgtttaaataaaaaaaaaacaacaaaccttaagctagactaaggaaaaagagaaaggactcaaataaataaaatcagggatgaaaaaggaaacattaaaactgatactacaaaaatttaaaggaccataagagcctattgtaaatttctatatgccaagaaattggaaaatctagaagaaatgagtaaattttggacagacacaacctagcaagattaaatcatgaagaaatagaaaatcttaatagaccaataatgaataaccatattgaggcagtactaaagaatctcccattcaaaaaactcccaagacttaatggtatcactgataaattctaccaaacatttaaagaagatttacaactaatctttctcacaagaattctaccaattcttccaaaaaattgacaaggagggaacacttccaaactcattctatgaggccagcattaccctgatccaaaaatcagaaaagaatacaacaacaaaaaaggaagctataggccaatattcctgatgaatacagatgcaaaaaatcctcaagaaaatagtaccaaactgaattcaataatatattaaaaagataattcaccatgatcaagtgggattcatcacagagatgcaagaatgattcaacatacacaaatcaataaacataatattaccacattaacagaatcaaggccaaatccatatgataatttcaatagatgctgaaaaaaatttgataaaattcaattccttcataaaaatcctccagaaattggttataaaaacaacacaccttaatttaataaaggccatatatgacaaatccacagagaacatcatactgagcaggaaacagttgaaaacttcatttctaagatgtagaacaagacaaaaatgcccacattcaccacttttgttcaacatagcactgaagattctgtccagagtaattaggcaagggaaagaaagaaaaggcatccaaattaagaaaagagggagtcaaattttccctgtttgcagacaatatcatcataattagatagatggttagagaaaagcctaaagactccatcaaaaaaaaaatattagaactaataaatgaatttggtaaaggtgtaggatataaaattaacatataaaaatcagtagtgtttgctatatgccaatagcaaactatttgaaattgaaattgaaaaagtaattccatgtacaatagttacaaggtataaataaaatgcctataaataaacttaaccaaggaggtgaaaaatccctacaatgaaaactataaaacgccaatgaaagaaatcgaagaggacacaaaaaattagaaagatattccatgttcatggactgaaataatgtttaaaaatatacatattatccaaagtgatctacagatttaatgcaatctctataataaaaatctcaatgacattcttcactgcaatagaaataacaatcctaaaattcatatggaaatgcaaaagatcctggagagctaaaggaatcttcagcaaaaagaacaaagcttcaggcatcactctacctgatgaaaatatactgcatagctatagtaaccaaaacaggatgacactggcgtaaaaacagatacattgatgaatgtgacaaaatacagaacctagaaataaatatatgtatgtatatccaaatgatttttaacaaaggcaccagaagtactcattggggaaaggacagtatcctcaataaacggtcctcggaaactggatatccacatgcagaagaatgtaactagatcactatctccatattcaaaaatcaactcaaataagatcagaggcttaagtgttaggaccataactatgaaactactagaagaaaacatagaggaaatgcttcatggaatggagcaaggattctttaaagacaacctcaaaagcacagacaacaagagcaaaaatagacaaatggaattatatcaaattaaaaatcttttgcacagcaaaggaaataacagattgaagagacaacttacagaatggggaaaaaaaactatttgtgcactatgcatctgacaagggattaatatccataatatataaggaactcaaacaactcaatatcaaaaaagcaaataattaaatttaaaaatggacaaaagatctgaatagatatttttcaaaggaagacatacaaatggccaacagctatatgaaaaaatgctcaacatcactaatcatcagggaaatgcaaatcaaaaccacaatgagatatcccttcaccttagaatggttatcatcaaaaacacacaaaaaatttaacaaatgctggtgaggatgtggagaaaagagagctcttccacgctgttggtgagaatgtaaataagtatagccattatggaaagaggcatgaaagatcctcaaaaatttaaaaatagaaatagcatatgagccagcagtcccattactggatatagatctaaaggaaatgaaatcagtgtgttgaagggatgtctgtactccatgtttactccagcgctgttcacagaagctgagagatggaactgacttaaatgtgcacctacagaggaatgtataaagggcggcctgtaactgtctgaaaccttgttatttctcccacgtagcctctcccctctaatccttcattggctccactttcttcttctttttttttttccttttttgagacatgttacccaggctggagtgcagtggtgtgatctcagctcactggatcctctacctcctgggttcaagtgattctcctgcctcagcctcctgagtagctgcgattacaggtgcccgccaccacacccagctaatttttatatatttagcagagatggagtttcaccatgttggccaggctggtctcaaactcccaacctgaggtgatccacccatctcagcctcccaatgtgctgggattacaggcatgagccaccatgcctgacctcattggctccactttctccctcagcctcctagtctctcattttaagctggcttttgtcccctccactccactgaacatgctcttgcagtcaccagtggcctgtgttttgctgtagcagtgataattgacactattgatcatgcatggtttccctctgataggaattttcttgctgctttttctaagtctctgttgctggttcctacttcctgatttctacgttttgaaggatcccagaacacagtctctggactttctttctttcccagtctctttgtactcactccctttctccctttgatctcacccgttctgaaggtttttagtatcatctccaggctggcagcaacaaaatttccatgtctgatccagacctcttatctaaactccaaacttctacacccaactgcctgctcacatctgcaccaggatgttgaatttgcatcagaaaccgaacattctttttactgagcccctgatcttccttccctgccctgtttccctcactcgatgagcagtccctctgccattctaactgctcaggctacagtccttgatttctcactttttctgtcacctcaaatccaacctatcagaaaatcctacactcagcctttgtgatgcacccagcacgctgctcctttccccatgtccacaccatctctcgttagaatgactaaaatgactcccacctggagccctcgctccagtccccatgccccttcagctctatgctcaacacaatagccagataaatcttgttaaagcataagtcatataatgccaccctgttcaaaaacctccaacatcctctctgtccctatctccccttcctgtccctcccttgctaaccctgctcttgtcacacaggctgctgcaggccttggtgtttgctgtttgctctgcctgaaaagccctcttccacccccgctgacatccccaggactctatcacttcgtttaggtttcactcaagtgccccttctcagcgagaccgactctagcctatctgaaactccacgtctcccttaaaattactcttcttcactgcttcagtttctttgcactaattacaatctactagtctacatattcatttatctgatgcattgctctcccacacccactagaataaagctaccttaagatgaaggcttccgcctgttttgttcacactgtatccccagcagccagaaaccatgtgtggcactcagtatttgcctccaaaatttatttgttgaataaatgaacaaactacacacatcaccatggataaatctcaaagcaataatgtggagaacaaagctagtcccagaagaactcttcctctgtgattctaattacataaagttcaagagcatgcacatcttagcaaaatattacttaaggctacaaacatgtggtacaactacaaagaacattgaggattagttaacaaggagttcaggagaggggttcctactgtagggtggggtggggacgtgattggagaggagcacacaggggccttttcaaggacacttttctatttcttaagtggggttctattcatgtttatattttgtgtaaaaaaaattaagttacatttttaaaagacaaaaaaagacaaagttacatttaaaaaatcattgaagcaagcagagtgcatcacctccttgtaatccaatattcataatataaatgaccccatccccatctcctcggccactgatctgatgcctctgttctgcttatctgctgcattaccagctcactgtgcagcaaattcacactattcattgttagctctatagcccaactggatggcaaacatcccaatagacaaaactccaagaagagtcaaaacaagaataaagtgcaggtcatcttttcttttgcactcctgacagcactttgtacatggtaataataatctaccaattaactacataagccacatggttttattatagtgtgaagctttgtatccagaaaggagagaaggctccctaagactctgtcaagaatgggtgcttcctttctgctgtaacctcttcttttctccaaagccagctcacctcttcctcctgactgagcacagctggggccctcccctaggtcggcttaatgaggtggggccctccctctggcttggaatccacacacattcctgcagccaaatgctgcagcaagaggcagggaccacgtttaatgcttttccttgggaaactgacctgtgtctccactaatatctgacaatttggcaagaggaccaacaagatttgaggcaatatgtgataaaatatgcagttatttaaaaaaatacttttatagattgggtgcagggacttgtgtttgtaatcctagatactgagaaggctgaggcgagaggagcacctgagcccaggagtttgaggtcacagggagccatgattacatcactgtactccagcctgggcatcggagaaagaccctgtccaacagaacaacaacaacacaaatagtgttccaaaactggataagaatgcagatgttcaaaggaagccctgaaaataagctcaattttaaaaagcggggagtaaagaattacaaaaggaaggaaaggaggagagaaggggagaagagggaagcaaggaggaaaggcaagtgttttgttcactagtatatccccagaaacgtttaaataatagacactaagcatttgttgaatgaatgaagtaatagatgaaatagatgtgaagcaatgggagaaaatatggacttacatggctaacaccctgtcacgtggcctgcacctgaatctacacaacaggcccctcagcctccaccatgtaacagagttcagggagcccagcctttttcttctaacacctcaatgccagacttgctccatgttggacaccagcttatctgtgcttctggtaccccagaggtacttgatgaacatactattttatttatttaacacatttggagagagtatctgcaaggattcctccaatgtagtatatcagggggtattccttggtctgttagttcccagaaaatgacctcattctatggaaaatctggttgtccatggttagtccaatgtggtgacacaaaatggaaatccttaaaactaaagaaagaattacagtcatttaataaagacaatgaaactgaaacatcatgaatcatagtttaggaaatcaatttgtaatgaagaaacatttagtatgggagaagggagtgagtaaattacctacggaaagatgaagcaacacatttatacaaagtgtcaatagataaaatggacacacctttagatgtatattatactgattttaaaccacacacattggtaacaaatagactaatccatttccaaactaattggattgctgggtgcacattactatcagagtagccagaggtaggcttcaaactaatggtagtaattgcttttaaacaacctttagatgagtccaggcatcttaaatgtcctatttatctccctttcctattgtagaaattatgctacagatcagcctaatgggggacccacacctaatagacatacaaaggacaattagaagagtcgagaagtaaaaagcaaaaaatgaagttttatagaacgaatgaagacaaaaatctgaaccgcacctgaagtggagctgggccttgtcacgaacaaaaacttacagtgcaaggttctgcagctggctggctttatgaccttgagcttccacttaacctgtccacacttccagttttcatctacaaattgaagggggttgtgcaagcatttgacattctttcagttgctatgggcagtgaacctatgaacatgacagtgacagcaatggcaagaaacagccgtgaggtcttcttgccatcaggccagagcctcttttcttgctcagactccgctgtggggagcaaccgcacaccagaccctccgacacatcctccgtgtttctgccagctctgccactattcaagttctcctgattttatcagcacctgctcttgttctcccatgcccaggaccactataatagcctcctttctattttctgctaatcatcactcccctaaaacacacaacaggtgcaatacttttgacatattaaatgtgtctaccttcagaatcccccagaaggagactctgtgacagggattcaagcaaaagtagtttatgtgaggtagttggtttcaggaaacacaggcaggaaaggaggcaagtgaacaataaaaggaagacggtcaatgaagggcacattatagcaagtcgccactatgagaaatggcagcttcatctcttggagacactgagaaccagagcaggaccctgcctcagttactcttcctgaaagcctagctagctgaggtttacatcaccacctccggctgtcactggccgtggctgctctcaggagtcaatctcaggcactttcacctgccaaagagagtccttaggggaagtgttgctactgggcagctggaagtgctgccaggaaatggtaaggaggtgacaggctccaggcaggcaccaacagcacctgcaacaccaccgctcatttttgtttcttaattgtcctgtgtctccttcacacacggagttgatggcagccattgcttcaaagaaagatacagcctaaaataaagactcagggttttgctctgagtttctgatttgtttctcaagtctatggtaagcatttcatttgaaagtctggatttataggacaattgagagggaagagagttttctaaattcccaaagcctccttctgcattaaggcagaacaaagcttggaggtctaatgatggagttttgccacaagacatggtgtgaagacttagaatatggctcaggacagagttcccacaacatggaagaggaagggagatgatgcagtgggcaggacatggagagatttgggggataaggatgaggttaagatgttgcctagggtccagttacggtggctcatgcctgtaatcccagcactttgggaggcagaggtgggcggatcatgaggtcaggagttcaaggccagcctggccaacatggtgaaacactgtctctactaaaaatacaaaaattagctgggcgtggtggtgcatgcctataatcccagctacttagaaggctgaggcagtagaattgcttgaacccgggaggcagagtttgcagtgagctgagatcatgtcattgcatttcagcctgggtgacataaaaaggctctgtccccacctgctaaaaaataaataaaaaataaaaaagtttttaaaaagatgttgcctggattcttgagaggaatcttagatttgagggtgggtatggtttagatgatagaaactctggattggtaggagtggagaaaaggaaagggaaggtctcccctaccctgagaggccacagcagagtgaaaatgctgcaataaaaagataaggcagagagcaggactgaggtagcaccctggccccccaaggtataggcgagttgtgtaggggattccaaagtttactgatgtgaatttaagagcaaaatgagatgctcatacatcttgaaatgagatattcatatagcttctatggcagactatttgcaaaaaatggctgcaataaattctgtcatccttcatgcatgtcctttgcaatgtgactttgctgctcccctgacttctctactcctagaatctggtgttcgccatgcaactggctttagttacaggaatattggcagatctgatgcaagaagttgggaattaaattaaaacagatagcacttatttagtaattgctttatgcatgtcactgtatgatacggtttggatatgtggccctgccaaaaacttatgttgaaatgtcatttccaatgttgaaggtggggtctggtgggaggtgactgaatcatgggggtggatttctcatgaatggtttagtgccatcctcctggtactgtcacgataatgagtgagttcttgtgagatctggttatttgaaagtttgtggcacctcccccctctcttcctcccgctctggccataggagctgcctgctccctctttgccttctgccatgattctaagcttcctgcagcctccccagaagctgagcagatgccagtattatgcttcttgtacagcctacagaacagtgagccaattaaacctcttttctttataaattactcagtctctttttttttgtttgagttagagttttgctctgtcaccctagctggagtgcattggcatgatctcggttcattgcaatctctgcctcccaggttcaagtgattgtcctgcctcagcctcccaagtagctgggattacaggctcctgccacaatgcccagctaatttttgtatttttagcacagatggggtttcatcatgttggtcaggctggtcttgagtttctgacctcaagtgatccacccatctcggcctcccaaagtgctgggattacaggcatgagccaccacgcgcagcccaggcatttctttatggcaatgcaagaatagacaaatacactgtactaaacacttcatattttaacttcttttatcctacaactcacagccataggagggaggtattattattcttgttttataaatgaggaagctgaggcacagaaaggttggtcaaaggccatacagtttgcacatcttagaggtagtattgcaagccagacgatataactcccaagtctgtgcgatttatctctggaatatttacaattcagcctgtaagaaagattgcccaacaaatggtcgtgtgtgtgtgtgtgtgtgtgtgtgtatgtgtgtgtattttatttttatttttattttatttttttgagatggagtcttgctctgttgcccaggctggagtgcagtggcatgatctcggctcactgcaagctccacctccggggttcacaccattctcctgcttagcctcccaagtagctgggactacaggtgcccaccaccaagcccggctaattttttttgtatttttagtagagacggggtttcaccatgttagccaagatggtctcgatctcctgacctcgtgatccacccgtctcggcctcccaaagtgctgggattacaggcgtaagccatcgtgcccagcccatgtgtatatattgttactcttccacatatataaaaggtcatgtcactcagcttctatggtagactatttgcaaaaaatggctgcaacaaattctctcattcctcatgcatgtcctgtgcaacgtgacttggctgctcccctgacttctctactccttcaatctggagttggccatgcaacttgctttagtcacaggaatattgccagatgtgatgcaagcagttgggaagggcatgagcattgtggcttcctgggacatgggtccaccacccgagtactaggctaggctagtccaccagagggtaaagagcatgtgctgaggcccagttgtgcctgccatccgatttgaagcccagacacttaagagaatcaagagagtgcctctccttactagaagagctgcacagctgcccccacagaatcatgagaaatcataaatgtttgccactttgggccactaagttttggcatcaagtctcgattgaatcctccctatgtgtggagtactgtttcatgtgggggaatacacgtatatccatcacagtggacagaatcgtgtccccctaaaaggtaagttcaagtcctaacacccagtacccgtggatgtgaccttatttggaaataagaactttgtagatgtcatcaaattaagatgaggtcatactggattacaatgatctctaattcaatgactggttttcttataagaagaggaaaatctggacaaagacccagagaggcagacacagacccacagggagaacacggtatgatagatatgacaacagggactgagaaggcagccaccagcagccacagagagaggcgaagcagactcccaccaggagcttcagagggagaccaccgtgctcacaccttgactttagacttctggcctctagaactatggcaaaataaattcctcctgttttaggccacccaatgtgtggcactttgttacggctgtcctaggacattagtgtatattctgagagatgcagaaaaagggactgggaaaaaaataaagaggaacacagaataaagacctaaaactgtggcaggcgcctgtagtcccagctacttgggaggctgaggcaggagaatggcgtgaacccgggagacggagcttgcagtgagccgaggtggtgccactgcactccagcctgggcgacagagcaagactctgtctcaaaaaaaaaaaaaaaaagacctaaaactgagatacagaggacaggaggtgtggtgactgctggcataaagtggaaagaatttagttacatgattttcttattttggggggtctatttatggttttcctttgaacccctcaggccaactccggttttgtcatcagctgcttgcttaggcgaggatgaggggggcagcttggtttcttggggaagctgggggctaacctggctcctaaaagggcctctagcccaaaacttcacaccccaaatggtcttgtcttcctcccagtcatgacacacttggttcaagagaaatgggattctttagtgggcctgatgaagaccctcatgccctgacagatgatacatagtagcatcttaaagatgttaaggatgacttttgatttttagccctttatctgacccacaaccatttattcttgttaatagatcatcataaataaagaacgcaagtatgcttgtgacaatccttagagtacagggatccggactgcacaaggctgcctggaaggggtgtgaaatggggtagtgaggaggcacaaaaaggagagggagagaagggtagagagaagggacacatagctcctcccagcctggggcctttgctcttagtcccatcctgtctcatctcttggcattgagtctcccagtccatccaagaggattccaggttggattccacagtccccaggctctcagcctcccacgtgctccaagcctatcctgagtgcccatctcactcccaccactctccatgaccccatgcatcaggactcctccttgcccccacattctccaagcatcatggtcacctaatagccggctctgctttgaattcctcattgcccctggaatcttttcaggctggattacatctttttaagcctgaataaaaaaaccaactgaatgatctttaaagtgcacgtgactcgcttgtgcccttctgatcatggataaatacccatatccctgggggcagcctgccagctggcctgcctatctctctgtcccccagtcaaggtgcacctgcaggctaattatgcacatcaatacggcggggagtgggctgtccagactcttctgtgctgccctcagttgggttgattgctggggctggcctcggagcacttgctacgggagcatgagaaccattctggcttcagtccaggacttcaaagccagctccccatccctcctgccatcatcccatgagcctgcccctggcagcagtcattgcacagcctggggtgccagtctttgcttccctccttttccttcctcactgccgccttctatctccatcactgtcccagatgaaaatgcagccatcgccctccacacatcaaaagggggaggtgacgagaggggcattcatctttttgcctccatgaagaatcaggagctgtattggatacgtttacatttatttatttatttatttatttatttatttatttatttatttatttatttatgagacagagtcttgctctgcaaccaggctggaatgcagtggcaggatcttggctcactgcaacctccaccccccaggttcaagcaactcttcagcctcagcctcccgagtagctgggactacaggtgcatgccaccacacccagctaatttttgaaattttttttcatttttattgtttttagtagagagagacggggtttcaccacgttggccaggattgtctcaatctcttgacctcatgatctgcccaccatggcctcccaaagtgctgggattaaaggcaggagccactacgcccagccacattcacatttattgattcaattggcccttgcttcacagctgcttcaaatatttcagaattcctcctgttttttacatcatgaaactgaggctgagagggtgacgttagcttgcacaggagccacaggtcatactgagtggaatttgtgtttgattctgacctgccttaccctagagacactgtctttctatccaactgcagaggtcctgggcacaggccagtcagggagtaagaatgggccatttaacaagcattcatagccaccagcagtcactgctttgccagtttcaagcaggcaagagtcaaggaagcctcagcagctgtggcattttgccacccaggtagaggaaccttgctttcctgcaaatctctcctcctgtgatccttgactgatgcctggcttggctgtgctgtttttctgggaagttagatgttattctcatgccatatctctggctacagctcatggactgtgcctggcctccagaatcttcccctttctgcacctggcaccaagccttctaatacatccctaccttcccagctgggacagggtccccaagacacctcactgagaatcaacacgatcagtccccatagtgtgtgcatgtgacactggggagcctggagctgatgcacttacttataatcacaacattcccaaagcacaacttggagtttggctctttgccttccttcttctggaatgcaacagtcattgttgaatttctaccctcacctaaccaggcaattccttatggaaagagtcagtctggtatctgaactcagtgaatgacttcaagttaaacccaaggctgcatccatgatccttccaagtagtggactttatcatccttgagtctggctcatcacgaagatgcagttttgctaaatctaagtacagctcttatctgctccaagtctcccagctcggtacctgttatcaaatgtttttaggagagagtctgtttccttatcttttctagcttctagaatctacatgtatttcctggctcatggccccccctctattttcaaagccaacaacatagcatctctctctctctccctcccgccctccctctttttttctctcctccacccctccatctctcatcttatatttgaacacagatgtgtactacagggagaacatcatgtgatcatgaatacagacatccaccagctaaggagagaggactggaacagatctttccctcacagctctcagaaaaaaaacaaccctgttgacaccttcatcttggacttggagcctacagaactgcaagacagagcaaacttctcttgttcaagcctctcagtttgtgatgctttcttaacagccctaacaaactaatacagagagaaacgatcccaattagagagtgccctggtacgtttacttttttaaaaaagaacttatcagaagagtactttcagggatcatttctatagttcattactagagaagtttctctaaacatgtagagcatcaaaaccgcacaactacatgcaaactgaacaacctgctcctgaatgactactgggtaaataacaaaattaaggcagaaataaccaagttctttgaaacccatgagaacaaagatacagtgtaccagaatatctggaacacagctaaggcagtgtttacagggaaatgtatagcactaaatgcctacatcagaaagtgggaaagaagtaaaatcaacaccctaacatcacagttaaagaaactagagaagcaagagcaaacgaattcaaaacctagcagaagacaagaaataactaagatcagagcagaactgaaggagttagacacatgaaaacaccttcaaaaaattaatgaatccaggagctggttttttgaaaagattaacaaaatagatagaccactagatagactaataaagaagaaaagagaggagaatcaaatagacacaataaaaaaatgataaaggggatatcaccactgatcccacagaaatacaaactaccataagagaatactataaacacctctacacacataaactagaaagtctagaagaaatggacaaattcctggacacatacaccctcccaagactaaacaaggaagaagatgaatccctgaatagaccaataacaagttctgaaattgaggcagtaaatcaatagtctaccaaccaaaaaagcccaggaccagacggattcacagccaaattctaccagaggtacaaagaggagctgatactgttccttctgaaattatttcaaacaatagaaaaaaagggactcctccctaactcattttatgaggccagcatcatcctgattccaaaacctggcagagacacaacaagaaaagaaaatttcaggccgatatccctgatgaacatcgatgcaaaaatcctcagtaaaatactggcaaaccgaatccagcagcacatcaaaaagcttatccaccatgatcaagtcagcttcatccctgggatgcaaggcagattcaacatacacaaatcaataaacagaaccaatgacaaaaaatacatgattatctcaacagatgcagaaaaggactgataaaattcaaaacaccttcatgctaaaaactctcaataaactaggtcttgatggaacatatctcaaaataataagagctgtttatgacaaacccatagccaatatcatactgaatgggcaaaagctggaagcgttccctttgaaaactggcacaagacaaggatgccctctctcaccactgctattcaacatagcattggaagttctggccagagcaatcaagcaagagaaataaataaagggcattcaaataggaagagaggaagtcagattgtctctgtgtgcagacgacatgattgtatatttagaaaaccccatcatctcagccctaaaactccttaagctgataaacaacttcaacaaagtctcaggatacaaaatcaatgtgtaaaaatcacaagcactcctatacaccaataatagacaagcagagaactaaatcatgagtgaactcccattcacaattgctacaaagagaataaaatacctggaattacaacttacaagggatgcgataagacctcttcaaggagaactacaaaccactgctcaaagaaaaaagaggggacacaaacaaatggaaaaacattccatgctcatggataggaagaatcaatattatgaaaatggcaatactgcccaaaataatttatagattaaatgctattctcatcaagctaacattgactttcttcacagaactagagaaaactactttaaatttcatacggaatcaaaaaagagcctgtgtagccaagacaactctaaacaaaaagaacaaagctggaggcatcatgctacctgccttcaaaatatactacaagtctaccataaccaaaacagcatggttctggtatcaaaacagatatatagaccaatggaacagaacagaggcctcagaaataacagcacacatctacaaccatctgatctttggaaaacgtgacaagaacaagcaatggggaaaggattccctatttaataaatggtgctgggaaaactggctagccatatgcagaaaactgaaactggactccttccttaaaccttatataaaaattaactcaagatggattaaagacttacatgtaaaacctaaaaccataaaaaccctaaaagaaaacctaggcaatatcattcaggacattggcatgggcaaagacttcatgagtaaaacaccaaaagcaatggcaacaaaagccaaaattgacaaatggaatctaattaactaaagagcttcagctcagcaaaagaaactattatcagagtgaacaggcaacctacagaatgggagaaattttttgcaatctacccatccgacaaagggctaatatccaggatctacagggaacttaaacaaatttacaagaaaaaaacaaacaactccatcaaaaagtgggtcaagtatattagcagacacttctcaaaagaagatatttatgccgccaaaaaaaaaaaaaaatgaaaaaaagctcatcatcactggtcattagagaaatgcaaatcaaaatcacaatgagataccatctcaagccagttagaatggtgatcattaagaagtctggaaacaacagacgctggtgaggatgcagagaaataggaacactttcacactgttggtgggagtgtaaattagttcaaccattatggaagacagtgtggcgattcctcaaggatctagaaccagaaacaccatttgacccagcaatcccattactgggtatatacccaaaggattagaaatcattctactataaagacacatgcacatgtatgtttattgctgcattatttacaatagcaaagacttggaaccaacccaaatacccatcaatgatagactggataaagaaaatatggcacatatacaccatggaatactatgcagccataaaaatgaatgagttcatgtcctttgcaaggtcatggatgaagctggaaaccatcatcctcagcaaactaacacaggaacagaaaaccaaacaccacatgttctcactcacaagtgggagttgaacaatgagaacacaggggcacagagaggggaacatcacacaccggggcctgtcagggggtggagggcaaggagagggagagcattaggaaaaatgcccaatgcatgcagggcttaaaaccgagatgggttgataggtgcagcaaaccaccatggcacatgtgtacctatgtaacaaacctgcacattctgcacatgtatcacagaaaaaaaaaaaaagaacttgtcagaaagttctgtggaaccaaaagtacttactataattgttggtttggagaggcagaggaagtaggagagggtgctgagggcatactttcctaaccaatgtcattgccatgaagatttctgaggtctctggctccttcttccatgcccaattccttgcgcagagcaacttggaggcaaatcatgaaggcactgcctggcccagcccctggccctggaggaggcacttcctcctcctcctctgcttccgtggggccttttggtctccatcatgtcagacttagcacttcctccagctcagcatctaacgtgggtgatttgcacctttattatgaattgtttattctctggggtatctatgaccacagtgtgcaagtgatatttccattcaaggaccaaagaaaaaaaatttttttaaactttgtttcctgagagacacattccaggcatcatagaagcaatgggggagggatggggacacagagagtcattgcaggtaggctatgaccccgggaagaacatccttcacacctggtaacatttgtgagaaggtgtttcctccagaaaaaattagttcagggacattttgctagtaagaggccaattatctgtttgaggccaccaacagaatggttgtttaatttctataaccaaagctgacgtctcattgcatgatcagcgatcagtgcctgttatcaacagccgcaaagggtcttactctagggctccgatgcccgctccagatcccctgaattctcatctcacatgtggctggtcagctgcaggagaacgaggagctgacctccgccctgtgctgctgatgggaatggcatttccccaccctgtgcagctctggcagcctccctcttacccctgctatcacagccgcggaggcaggcagggagctcgtgacagctggcaagccagcctctgggaataaaacattttagcacttcataaatttctaacaaggtttcaaattgcggccgtttccctcctctcagctccgtcaactagcaaaaggggttgggggtgggggaagaaagactaattaaatctacggtgggaaagcactgctggtaagattgctacttattaaaaatcatgaactgttaggacccgattacaaagtaagttgaaattctccccattttccccatacataaaaatataaaacagagcctttcaattttatatgtatttggtatgtgtgtatatatatatatattttcaaaggattaaatacatatccttaacaggatagctgatatatgacattcttaaacctaagggaagatgacacataactaactaaaatgctgagagacattcaatatcaatactgaacattaacattgaggcttggtatcatttacaaagtagttatttcacattcttttcccctgggagttttactgaaagaaaatgcttgctagaagagcatcagatggagaaaacacagcctggaaagcctcacccaactgacagcttccaagttccaagttttggtcaccatcactaatgtttttaaaaagacaaaacaacaattccaaaaaaaaaaaaaaaaaaacaactttttttttttttttgaggcagggtctctttctgttgttcagtctggagtgcagtggtgcaatctcagctcactgcaacctccgcctcccaggttcaagtgattctcctgcctcagcttcccaagtagctggaattacaggtgcatgccaccatgcctaatttttatatttttagtaaagacggggtttcaccatgttggccaggctgatctcgaactcctgacctcaggtgatccacccgccttggcctcccaaagtggtgggattacaggcatgagccaccgtgtccagccaaaaaacctttcttaatttcatggttctttgttttaaaagaagggtacttgctttacaggaaatacgtaagccttatgggtaggggaaatgtggaacagggaacaaaaaaactaattcacaaagacgtttaattgtcaactaaaacatgttaggagcactgtgggaggggtgtgtttggaaaaataaggggtaagattttaaatagtttcactctgagaaaaccagcattccttttcctactagagtaagtaagcagggttgccttcttcaggtagtgggtctcacatgaaaaaatttcaatctgaaataagggtcgtagaattggtgacgtgagaattgggcaaaactagggcacagacagatcctggcagtaacttcgggcccacatcactttgggcaaaacacacagacaagcacgaagcaggtacaggacaaccaccagctgctgcactgagcattctctgcgctccctgcaccttcgcctgatgcccattttcttttttagcgtgagaaagttgacctttaggatgacatacaaaataagcttctccagctaggatgggaggcaaaatgcaaagaccatgtgtgctatttatgtttgagaatgaaccttcctgcaaagtatcagcctgtcgtatatttagaacagagaccccagggtgggagcatctcatggcagctcccaattgaatgccagatgcaaatgatcacttgctattaatcccagccttgctaacatttggtcctgagcatcacagctaattgacgggatgaattaccatttctacggatggtgccacctgtgacattcaggatctttgagaggtagaacccgcagtagtttaacattgccagtttagtcagttatgatcattgatacatggctcaccattttctctctttctctctctccctgtgtgtgtgtgcgtgtgtgcatgttacatggtttcactatgagatatacagcattttattttgtctacatatgcaaatgttcagtgacagggacaaaaagaaaaaaaatcaagaataatgaatgtgattaagtggaaaactacttataaaacactctaaagttgactaatataggcaaacactgttaaagtcgattttagggaatcatccaggtatttcacatagcataggctataacttcattaaagaaaacatggtcacccctgcctgaactgcacccagattgcaccccagtggctctgagccaggacaggtggccagtcaccccctgcctgaattgcacccagatggcaccccagtggctctgagccaagacaggtggccttcccacctgcctcattaccttacggtgacacccctccccccacccccaccctgaggggctgcagtgtgataattctgggaagagcttcagaacctatctgtcctgcatgctaatccaagtttccaagtgattttatgtgcattttctcatccagtgctcccaacaattacagcttgtctttcactaaccgaaagcattcttctctatccctcccagtaattcctgcagggcataacctgtgaggaaaagattagagatggctaatattttgggtataatgaacgaagccagcttcagtttattttcattaaacacaattcccatttccaggtgtttgttagttttggtgaacatcacaggatggcctttccccggtaagtgcagcaatccatctgttgtaaggagcacctctgcactcagacctcctgatgtggaagtgcttcaaggtaaaagcaggcttcccaaagcttgcgttgattgtaattgtagtgaaagttagaaacaaaagccagtagttactgagaacagaagttgagcaccagacctcggatatagcataggggtatggaagatcttatagaacaagaggaaaaaacaaggcattttctttgaaaaggaaggtggaggcccaattgagacaggctgaaattcacccaagaggggagattatcaaagagatgcatattgaagacgtcctttgatgtcagggtgaagtagtatggtgactaaaatattagaactatctctagagggcagctggggatgtctgctcctattaatccactagagtctagacctgaaaggctcatgggggcccttccccaaccctctgctctcacttcccaaggctataagtggccatgatctgtgctgaatccccactgcagggaacattccagaacaaggattgacacttacatctctgtgatacactacttgttctctcatattcttgatagttggtcctgagccaagtattctagcaaagatggtgcagcacagaaaattctcaggtttcattttccatttagggaatgtgggagctctggtcagagacccacagatgaccccaacctcaaagctggccagctgtgctgcacccatggggagaaggagatgaggcctgcatgctgtggcagacacaggtgggtggagaagtagatgaggcctgcatgctgtggtggacacaggtgggtattgtcagcatcctgctgtcttcacagtgagagccctttcagagagtcccaaatccaagccagcctccttcaaccatccctggagaggtggatctcatagcatctgccaagagtcttgtgcttaactgtgtatcacgacagactctttccctgaccagactttaggcaggcccctctctaagctcttctcaactaagccctgactttggagcattttttcttgtctctgccttctccagttttagcaagaatcctgcttagtttggctatcctgggtatctgatcaccctaactatctgatcaggtttctccttcaccaacccccaggtggttgtctgatcaccctggtctgtgttcagcaagagtcatgttcaggtgatgtagccagaatgccccttacccttgatgtctcctgtaaataatattccatccactgatccccacctcactacctggctataaactcccatttgttttttgtatttggaattgtgcccaatctctctcgcccacttcaaaatgcaattgcagggtctctatggctctgaataaagtctgccttactgccttatcaaaggtcatttttttttctttaacaataacactgaactcttccccgaggttaaaccaaggaacattctcaaaattatatccaattatcttcctaaaaacaaaagggagttgctgtataactggtcttcatttcttccctagacaaaacaaaaagtagacttgaacatttcttaaaagactggtctccttaaattcttttagtttctcttcatttttatcaaaatataaaaaccaaattcagaatcagtttctcaacttttcaatattttctttctctattggcatctcagcatcaaagtattaaagtagtgccgtgagactcacacctccaatggctaggaaattggccagcttaggcaccaatactgcacccaagtctggaactgtagaatacagtgatgatcttgtattgactttgaaactcatctgtaagagttattcgagttttttccatggaaaaagaatgcaatattgtcaaaattgctgataacggccaagtcagggctcacagcccttaccgtctttcagaacagttgggggtgtagaaaaagaaactacagctaacactcagcacctgcaaatggccaggtgcagctctaaaccttatttgtgtgaaaactcacttaattgtcacaacaaccctacaggaggcgaatgttattatgggatccccatcttccagatgaaaaaaactgaggcacagaaaggttagttaggcagccctaaccatgtggctggtaagaagaacagagcttcaaagcctgagatagtcataacctagctaggaaaactttttagttgttactaaacagatgcagaggcatattgaaagtaaaagtaaaatgcaaaaacagaagaggtagaaagggtgccaaggtgagaagttggcagtcttttcttctggaaacttccaggagatttagaatgaaagaaagaaagcagccaaggggatcatggtaaacacgaggcagcctggacatggcatagcacccccaggctgccggactccagggcatgcccaagggtagctgcagagtcaaactaaaccaagaaacagagttgggcagtgtaaagagctgtaggcttcacgcagtgggagacaggccacccagcccacatgagggacagaaagccacttaagggcacgagctttcattagcatagaaccatgctgcccattttaccaggtattttcattgagcaggccatgggctgggtgtcctataaggcaggcctgggttcctcttcaggctgctgtcataacgcagttctgagctgcaatgattgaaacggatggaggagggagtattgggaataaacaagagtgaaggtcatctcaaagcaccttttacatttttcccgaaaggtggagttttgaaagcagaaccccttgaaaatgtgttcttgtgcatgctattccttcagactgtgagcaatttctcctctccgcacctacacgggggaaggcttccggaccaggtttctgcaaagagcacttgcgtggttcataaaagcaacaccggaactcactcactctgccttctccatccctctgggcatggctcatttccatcttaactgcatctctaagtaaatcaagagccagcgaaaggaagtatgaagatatagtggggaaccttgaacaattccttttttactcccaattactttaggtaaaactctgaatccaacttgttttatttgtgatgctattgttacagcctcaaaacctgttttgacttggaaaggcattccaaataggtacactgggaactcaacctaaaatagccagttaattttacacgcacattttattttcagggaacgtgcgtatgtcgcatacaatgaagaggggaaaatggagactggagtttatgatgtaatctttatgcgaattttattatttcataaaatgtgaatacgttcatgggaaagaggccatgaaacatattcacttttgctacacatgctgataacttcaaagtcaggtggacgggaattgacacagaattttcataataagggctgataaaatgtgctattgtgtcaacacatacttctagcttctgtttttaaatgttttgctagtaataggtttaaaaagtgatttgtttctgtttttttctttttgagatggagatttgctcttttcccccaggctggagtgcaatggtgtgatcttggttcattgctacctccacctcctgggtgcaagcgattttcctgcctcagcttcctgagtagctgggattacaggcacccgtcaccgtgcctggctaatttttgcacttttaatagagacggggtttcaccatgttggccaggctggtctcgaactcccgacctcaggtgatccactcatcttggcctcccaaagtgctgggattataggcataagccactgtgcccagcctgatttaatggttattgcctatctctttcctctcagttataggcatgtcagacctgtgtcctatacctcctgctgcgggtggctctgcatagagctcaggcagttttaggaactgtcttagttccctcagcaggagccctgcccatgtccaactgcctgtcttggtttggtggcctccccagccaaattccctcttcctctctgtatcatacaacctcccccttcccaaatacagataactgccggaatggtgggcatctgctgtgctgtgcaacgtggttccctttgtgggtgttactcacgcaaatcacgtcctctcgtggctgccaccattatggaccagggcccgtaacaaattccataacttcacaggatttgccttaagaaataacgattgccataatcgccgcggtggtggaccctgtcccggagagctgtcttctgtcaaataaaaagcagctcctgctggaggcattgctcactcccagcagcccacagtcagtaactggctgacctaggggtcaaagcattggccctattgccacaggtggatcatatccctgcagggcgctctgtgcgccagagccagcctgtgaggtcagacagaggccagtccccagctgaaaccacatccctgacttacgcagctccccacctaacccttgttcaaccaatccttcatcagtccctcgcacgagaacccccttctcaggttctacttctaggaaacccagctgtttacatttctgagggctgccataacaaacttccacatgtctggttgctttaaacaatagaaatttggtccaaaattgagatgtaggcagtgttaattcccatgcctctcttagcttctggtatctgccagcaatctttggcatactttggcttgtagacacacaactccaatttctacctccgtcttcacatggccttcttctccctgtgtcttcatgtctaaatttccatctcctctctcttagaaggacaccagtccttggatttagggcttatagtaagtccaggctgatctcatctccagatcctaacttaattacatctgcaaatactctatttcaaaataaggtcagattctgaggtaccaggagaacacgaatgtttgggaaacactgttcaacccactacaccaacctaacacatttcagcaaagtgcctacaagccaaggtaagtaagcaaaagaaagcacaggcccctgattttccctctgatgccatagaaaggcatttgggccaagacactgtggtgggcaggcagtgtggctgtgaattctaggggaagttcccctctgctaggctgcctgccctttaaacaaggcaagtgtgagagcaatcttgtaagtaagggaataatccagctaccggggcaccaggcaggatgaatttagatgtcagctgtttgaagcaactgtttggaaagtccagatccccagaatacggaagccttgaagacacagtagaagctgggttcagatgcatcccccctaccctgaaaaaggaagatattggtcccatgggaagctgaaattgggttgaggcttccccactgggaacaaggggaagtgctagctgagatgctgtccaacaaccagaagggagcttccagagcactttaagacaacagtgctttgcacaccacatcatacaggacaggcggcctgtgacttagttactatgagagttctgccctaagaccaatcttttttctctctctctgagattttaataaaagatgtagagtgaaagagcatagaagtgatagaggggaagaacaagcataattcatagtggaaagtgatgtgagagagacatagacagaggctggtgtgctgggaatcaaactgagtgaagttaatggtcaggtgaagctccgtgggttgtacatgaaggagcaatggaacagcatgggctccagactgcctgggagctcaaacagccttccaggctccactttcggaaaggtacacatgagtgacagttcctttccttctttgttgcctggccatgtggttgatgatcctagcatcttcgtttctaaatgtgtctcataacctgcagagacatgagtcagtcttattccagttcatctaaatgaaccaacaaaatgtctcataaaaatatgaagataaaattaatctgaatatgtgaaactatattaaaaagcctaaagttctgtacaaatggaacacattattagacataaataagtcatgttcatactggaagccacattcatcatcacttagttctatcacttacttcatcatcacttacttctatctcggtgagtctgagattcagcttaaacatcttaccatgatcatggaacagattcaacaaagatctcctgaatatcctcaaaaaatagcataagataaaccatccaaggtcctttactgctattattcatctctcattcagttatgcattcattcactacatggagactaaggaatgaaaatgagcaaaattattatgtaataattatataacatataattataatttttacaaaataattttgctcattttcaaacccaatctgaccccttgttgggtttgtatcataatcccaaaagacacaatcacaaatgccatgatcccaaaaattgaaatcctgaaagattgaaatccctaaagaccaaaaatctcaaagttcaaatccctaaagcctaaaatccctaatatctaaaatcttgaaaatcactatcagaaaatagttgcatcatgttaggcagatctagccatcttgttattaagcatggtttaaggcgaggaatatgggtgccaagttacccacgttgaccagtagtgacttaatgtggtcaccagtggacttaatgttaggtgttaacttgattaagaactgaaggaatacctagaaacctggtaaagtattattttgagtgtgtctgtgagggtatttccagaagaggttaccgtatgaatctgggtggactaagtgaggaagatttgccttccatgttgtcaggtgcaccatccaattcgctgggcaccaggaaagaacaaatacagaaggcaaattggaaaaagctgtcagcaacaaaagcttacaacggattctgaggcacagatccctctctctgagagctgggacagatgtttcttctgctgccttggacatcagaactctaggttcgccaacctttggactctaggaacttacaccagcagctcccaggatcctgaggttttcaaccttggactgagagacacatcgtcggcatccctggttctcaaagtataaacattggaacttcctcaataaatgaagagatgtcctttttgtacatttgtatctgtgaaagatgcaatttctggagatcttggttctttgggcgattgcaaatgcggtggcgaacctttgcagttttgattgactcgtcaaaagactaaggttgttcatcatggtatttcagacgactgtagttagaaagctgggtgcacacaataaccaaccatagtgatgtgaatttatacatttccctttttagcctgtttctttatgaatatgtgctgtctgttcctaactgttatgctcatgtgactatcattagtatacctgagtgtttatgcttgcaaaaatatttatgttattattgcttattttattgtgtaaagtggcctatcatgtttctcgatgatgtttttatgtttttccaataaatccccctttaaaaatataaataaatacctctaatataattttttatattatttcttccagaattataatttggggatttgatctttcagtgttgttattttcaggattttagactttgcaaattttgactttctaggatttcaacattcaagattatggtgttctaggtactgtgtctttcaggattatgatcagctgcccacttctatttgcggatgagacagatttaatcaaatagtcatagaaatgaaagaaaaatcacaactttgataagtactacaaagaagatctctgatgctctgagataatacaagagggtaaattgatctattaggaggttgcagttgtggagcaggggttgtgagggccagaggaaggagaaaggccctgcagacagagagcatatgatgtgtgcacatcccttagacaggaggagtcattgtggactagcagaagagaaaagagcacagaaagccagatggagcatgatttaaggtgaaggtggaaattctctggggagaaggctgttcagggccttggggaccaacgtaaggatcctggtctttgttctatgagcaatgggcagcaaggagcatatttcaagcaagagattaatataatgagagtgttcttcttaaaaaattacatgtggcttttaattcaagatggtagaatgagctattgatattccctttaagcttccttaaaataagagtaatgagctaagaaaagagggaaaatcattatggcaaagaaaacaggaaaagctgtcagcaaccaaaagatgtcagcagattctgaagcaccgatctctctcactatatcttagtctgctggactgctttcacaaaaataccatagactggatgacttataaacaacatgtatttctcacagttctggaggccaagaagtctaagatcaaggcactggcaggttcagtgtctggtgagggttcattgctcatagttggcgccttcatgctgtgtccctagatgatggaaggggccaatgagctcccttgggcttcttttataagggctcgaattccactgatgagagctccacacttatgacctaatcacctctcaaagactgcaccttttactaccatcacattggggattaggttacaacatataaatttggtgggagccgaaaaccttcagacaacagcacatcataaagcaacaaagactattccataacccttgcccacttatataagtttccttcctatctgctcaatctttaatataaatggaaatcaacagccatcagatattcaaggaatgcttgcatcatgaaggaggaagaccaaggcaacaaatataaaaatacaaacgttggatgaaacacaattcagaaaacgggagaaaacgaaaataatcatcatcatcatcattaagaattccaggagataatctatttgtaagacaaaaatagaattgtgatgaagaatgtgaaagagacactaagataaataaaatacagaatgagaagactaaatagataactaactggaatctcaggaatataaaagaaaatcattaaaaagatacaatttttagaactatcagaaaatatgtattaaaaatcccaaaagtacaatatactgagataaataaaatcagaatatataaaaagaaatttgtgtccaaacacactttgacaaaattacagaacatcaaaaacaaagaggagatcttaaatgaagccatagagcaaggacaaacagcctacaaaaaggaaacaatttaaatgacttcagactttccaacagcactaatgaaagctagaagataatgatattttacctccaaagtacaaagggaaaatatatagtcagtacagaattgtgtgcccagccaaatactcttttatgaaaaagataaaacaaggatgggtaaagataacaaaaactgagagggtatgccacaaagaaacctgaaataaagaaaattctaaaggatatgcttcaagaaaaaggaacacgaccttaaaaagatggtttgggatccaagtaagaatgaacaaatgaaattataaaacagtaagcaaatccaaagaaataacatctgaataagctaataataaaataatacctagtatctgggttaaaaaaaaataaatatatagaagtagagaaaacaacaggagcatgtaagttttgtttgattgtttctttgtttttgagacggagtcctgctctgtcacccagccaccgtgcctggcccagaagcatgtaggttttgaggtgagtgttcagaatcaaaatgctccaaaacctgcttttgttttttgtttgcttttcatggaagaaggtgcttaggttattgcttaattgcagacttttgctaatttaaatgtacatggtaaatttccaaggtaacatctaaataaatggaaatagaatatatacattctaagtaagtacagtaaaagtaaaaaagaaaaacttattaaacaaagaaagaaggatgtataaggatgataaagtgtgacaaatagaagtcaaaagtaaggtgtgaaaagaagttcagtatatcaaaaatcataaagaatgtgggccgggcatggtggctcatgcctgtaatcccagcactttgggaggccaaggagggtggatcatctgaggtcgggggtttgagaccaacctgaccaaaatggagaaaacccatctctactaaaaatgcaaaattatccaggcatgatggtgcatgcctgtaatcccagctactcggtaggctgaggcaggagaatcacttgaattcgggaggcagaggttgcggtgagctgacatcgtgccattgcactccagcctgggcaacaagagcgaaactccatctcaaaaacagaaaaaaaaaaaaaaaaaaaaaaaaaaagagtgtgagtagactaaacttgtgtttgaataatcctgcccatggaagggctcagaaaagatggaatagctaactattgttttctactatattagacttttgactttttaaccttgatcattttggtgtatttttaaaaatgggaatgaaaggtattttgggctgaagtatgaaagaaggagagtagagagaggcaagacgggctattaggatgttattaccatagcctgactgactgatgataaacacacttaaactttttaaaaacttcctcaatcatttcatggaatggattctgacgaagagaaattttggttcagacgtcagtattaatttttaatatgtattgccaaatttatctgaaggaagtttatacccttcaatgctgttacacatttataacattttcttgtaaaagtactcattgcatgcgtatcaaattcaggcactattccagtttacaatagggaataagagaggcgaagctgctgtcctcatggatctgccattccagtggggaaaggtgaggaagacaaatggtataaaaagcaaatcaataaataattttatatgataaaaagttaagaggaaaataaaataggtgagttgatgggaggtgacttcagaatacatagtaagtgaaggacccttagccaggacttgagtgacctggagggacagccgggcctggcaaagggatggcagtgtaaagagcctgaagtggaattacctgggtatcaccaaggaatagaaaaatgcccatgtggccactgcatagtgagcagagggctgggtggggtaaggaaggtgtgcagagaccagatggtaaggagcttgggttttctttaaaaaagacaactaagatttatatatacagctatatccatgggaaggaaaaaacagacacctgatgtacagatcaaattcagaagtgtgtcctcattcacaccatgtaggaatctcacctttacaagcagagttaggagcctagggctttctacatgcatcttctcaattataacaatcgcagatgtagatgtcatcgtctccatttgaatgtcaaggaagcagagccagacaagtcacactgcttgtaaatagcagaatctggccttaaatgcaagttgtgctgaagcacgtgttctttccaaacaaagttccagagcccatgttctttctatcagaagctaagggaccacccacctgcatactggcatgatgaggctctagaaactgacatgcaacctcttggccacctaaactttgtaaaggtgacttgggtttcagtattttacttaccatttataattttgtgcctcacctatttccaaatataaacgtgtgtgtgtgtgtgtgtgtgtgtgtatatatatatatatatatatatatctcctgttatcctatttatgaactaaaaatattataagaaacttgaaaagtcaagtgtgtggagtgttaccggctgaaatgtgtccccacaaaattcatgtgttgaatttctaatccccagttgctcagaatgtgactgtgtttggagatagggtctttaaaggggtatttaaggtaaaacgaagtcatatgggtgggtcctgttccaatctgactggtgtccttacaaaaagaagagatgaggatgcaggaacatgtagaggggtgggcctataaagacacacagagaatggcctcaggagagtccagcttcgctgacaccttggtctcagaaatccagcttccaggtttgtgagaaaataaatttctgttgttgaagccactagtctgaagtactttgttatgggaccctagcagactagtacttgaattgtttatgtacactaaatatggtataatactagaatatttctgtggccatatttcaggcgattgatgtagttaaattccacaaaatcaaaacaagatgtttaacatgtatctcttgaattattaatagtaacatttttttttttcttgagacggagtcccaccctgtcacccaggctggagtgcagtggcacaatcttggctcactgtaacctccacctccggggttcaagcaattctcccacctcagcctccagagtagctgggattacaggagcgtgccaccatgcccgggtaattttttaacatctctactaaaaatagtagagatggggtttcaccatgttggccaggctggtctcaaactcctggcctcaagtgatctgcccaccttggcctccccaagtgctgggattacaagcatgagccaccgtgcctggcccattttgtacattttaaattttatcatgtgtttactttccagcatatagaacggcagaacatcagattagtaaatagcattcattactgcaatcactcttccaatgtacatacaattgactctctgaacaatgcggatttcaagtacacaagtccacttagacacagatttgttttcaaccacacgtagcttgataatgcagtatttgagggatggaaaactgaagtatacaacctttttttatatgcaggttatatagggctgacttctgaacttgagtatgcctggattttggtatacttgggggtcccgaaaccaatcccccacacatacagagagatgaatgtactaagctcacgctgtgagctaattaacttttctttgcatttccatagaaaccaccccaacccaggccattattgcttctcaacagacctcagctatgtcctacttacattctgtagccaaactgcactaggtttcatcattaaatggtcaagctactgcatcttcttcccattttcctctactttaaataccttctcttggctgggcgcggtggctcacgcctgtaatcccagcactttgggaggccgaggtgggcggatcacgaggtcaagagatcgagaccatcctggctaacacgatgaaaccccatctctactaaaaatacaaaaaaaaaaaaaaaaaagaaaaaaaaaattagccaggcgcaatggcgggcgcctgcagtaccaactactcgggaggctgaggcaggagaatggcgtgaacccgggaggcggagcttgcagtgagccgagatcacgccactgcactccagcctgggcgacagagcgagactccatctcaaaaacaaaaaacaacaaaaaaaaaaaccttctcttctagtcctgccagaaattaagccccactctccaagcccaactccaatggtatcacgtccagcaactatttcctaaccaactgaccataagtggcctctgcctttcttaacttctattttactttgaatcggtaatgggctttcattttaattattagcctaagcatcttagttttcatcctaaattacaaacttctcacagaaaggaagtgtggcttgtgagttttaaaattacctcctggttgggcgcagtggctcaagcctgaaatcccagcatgttgggaggccgaggcgggaggatcgcttgagcccagaagtttgagactagtctgggcaatgcggtgaagtcccatctctacaaagaatgcaaaaaattagccagggcatggtggcatgcacctgtagactcagctactcgggaagctgaagtggaaggatcatttgagtacaggaggttgaggttgcagggaggcatgatcacaccactgcactccagcctggtccatagagtgagaccctgtctaaaaaataaataaatataaaataaataaaaaaaaatcactttctgctttgtacatagctgggattcagtctgtacttattaaataaataagtgtcatattaagaattgcttctccgtaatgcaagtgaccttccacttatttttgtatggtaaattttagttgagaattcaggtgggtcacactttaacatgactgccctgaggcggatcacatagggattacatcatctaccttcatgaaacataggagggaaattcagattatggagcttatgtcctgaacctgccaggggaggttgctggtggtatttattggtatttttcttcatccttgagacaaacaatgcaaccaaattctttacagaaaagagagaagggagagtgtaaaagtggacattggataacacctaattcaataacaacattccgaagaaggagtcagacattgctgagactgttacatagcagcattagcaggttacagttctcactccaggaaggtaatttaccctaaggctggcactgatttacaatagatgaggtgcgggcacagctcttcagtgttgaccagcaccggcacatgggattgcagcaataacctgtgtaacacagacagcaataccaaaccgtgcacttggaagccagggatggggagaaattgatgtggaatgtgtagctttaaacctgctactatctgcatgtgtgtgtacgtgtgtgtgcgtgtgtgtgtgtgcatgcatacatgtatgtgtgtcaaaaatagcaagaaaccactaaaaggcctcagttccacttttggagaaaagccattctttaaaaggactttaattgggaaagtaatatctgctgcgggtgacacaggaaaggcatctgtggagtcacgtgacacataaagaggaaaaggcccacacctctcaaaaatcactgcaaagaatcccgagcaatggagtggacagcaccagtgtggtggaactcttggaagacgctttcaacttgtcacatgtaaaactgcattaaaatgtctttcatatgtccatgagcactgcattgttgaaggcaaatgactgtgatgctttaaggatgcccaatttgaagaatccattgcttcctaaagaactctggggagcatagctcaaagtagcctaaaaaatcgcattcttctctttcttcacatacagacctttaaaaaattggaaaggtcaaatttgcttctgtatataatctaataggtatgcaatatttttggagaaaagaaaatattttaaaagaaaattttcttttaaaacaaatttataaaataactcatcttttattattttatttataaatatatacaaaaatatataaatatttttatatatttataactatttattattcattttattagagaatatacaaaaacatgtgatatggttctgctctgtgtccccacccaaatctcaccttgaattgtaataatccccatgtgttatgggagaaacccagtgggaggtaattgaatcatgggggcggtttcccctatactgttctcatggtggtgaataagtcttacaagatctcatggttttataaggggttacccctttcgctaggctctgattctttcttgtctgctgccgtgtaaggcgtgcctttcaccttccaccatgattgtgaggcctccccagccacatggaactatgagtctattaaacctcttttttcttataaactacccagtctcaggtatgtctttatcagcagtgtgaaaacggactaatacaacgtgctttggattaacatacagaaacaagtcaacatttattagaatctcctttgcacaaatatatttgcaatgggccgaatatctgtgcctccccaaagttcattgttgatatcctaacccccaatgtgatgttattcagagatggagcctttgggaggtgattaattcatggaagccctcaggaatgggattagtaccctgatagaattgactccagagagtgctcttgtttcctttccactgtgagaaaatacagggaggagatgaccatctacgaaccaggaagcaggccctaaccagatgccgaaccttctgctgctttaatgttagactttcagcctccagtactgtggggggagaatgttggtttttgagaagcacacaggtgtgacattctgttatagtagcccaagtgaactgagacaatattcattctaaacaaagctgaattatggcctattttattcatttgattttttatatccatttaaaatataccatttagtcttctaattcataaagtctaaatgcacagaaagataacttccaagtcaactcgatgattctgcactaaaagctttttagaagtagagaccaatacaaataaaatggaaataaatttagatgtgggcaaaacaatttgcattgagccacaaacataaactatctttggtgagatttaaagctatgaacctgcaccacactgatgagcaaatctgtgagaaatctcatttgaggacctcctcagttgattgtctattatcctccaggagctgtgataacactaataagaaaatactcccttgtagagagcttcaggagctgtaagagaaattattcaatccatccttgtacccttccttgagctcactgtggaattactctgatggaaaactgcctttgtggtcccaccatggaaaaggtgctcctgaagtttcctaaaataagggcaggaaggcctcactggccaatacacttatcaggagaatagcagtacagacttttaacaaaaaatagagagtactttcaataaataaagcataaaagtaaggctttcgtatgctgcctaaatcctaatcttgtacatatctttcagttaccacagtatggcttcccgccaacctctgggatgtggcatgtaatgggactcccaggatgaaaagactcggtgtcctgtcgttcattcattcatttattcattcattcagtcatttaatatgtatgtatctgtctatgctatgccaagaaaagccatgggcattgggatagagcagtgaggaaaccaacacatctgcctcctcagagaatttacagtccagaagggtagagacagacccacataaaatggtagactactagtttctttcctttccacatactcccatcatcattttccattgagatggtattttttccctaatgctgatatgcaattatctcatctaaaagaaatcatctggccggacacagtggctcatgcctgtaatcccagcactttgggaggccgaggtgggcagatcacctgaggtcaggagttccaggccagcctgaccaacatggagaaaccctgtctctaccaaaaatacaaaattagccaggcatggtggtgggcacctgtaatcccagctacttgggaggctgaggcaggagaattgcttgaacctgggaggcggaggttgtggtgagctgagatcgtgccattgtactccagcctgggcaacaagagcgaaactcagtctcaaaacaaaacaaagaaagaaggaaggaaggaaggaaagaaagaaaaaaaggaaggaaggaaggaagaaagaaagagggagaaagaaaggaagaaaggaagaaagagaaagaaagaaatcatccacatataaacttcagacatgcaggtaccatagtcacgggctcccagtccttgctacctataatgaggtccacgaaccagcagcatcagcagcacacgggagctttttagaaacagtcttgagcccacctggacctaatcaatcagaatcttcagtttaacgagacacccaggagacttgaagggacactgaattttgagaagtagtgcacttagatgttttctcaaaaggtgctgcaggggacatggcatcttcatgctaagtgaaaaagccagacctttggtcaaatagagtgagaaactgctggttaaggcaagtcagtgacttcttcaccttgggattcgtcagagttccttatgtctattttaaatacccaagagaaagaaaccaatactaatcataataatggtcgtaatcactaatatttatagtttagttactataggctaccactaaaattgcttaaatatgatatggatatggaatcctgtttaatcatcagtcagtccccaaaatttggtgttattattcttatttttcatattacgaatctgaaactcagagaggctaagttactttcccaggatgacacagtttgcaaacttgccaactgggaacccagccctgcctgattccaaagcccaagggctcgatttgaaacgtatggcaattttctaaatacattgaatcattgaacatggacacagcttttttctattttgcaaagaccacctaggactagtccatgaaatacaggctgggaaagtatttcacagaaacacatttgccaccatgtggcaggtccctactcaggggcagaaacaccctcaaaagtgatgtcaatcttaaatgtgcgggcttgcatactagccactcagaagagcacaaaacaatttaaggttttttcccagacctgagatatcaattacatcttgccgaatgatgtgtcctaactggcatgccactatcagatttaagataaaaatcacatgtggcctagtctagacacactggacttctgtaatctcttctcattgtcactaaacagctggtacaaatgaatctaccacttcctcatatcaggcccctgacttaatgtctcaccccatttctcaagaaaagatgcacgtccctcataatgtcaaaacgattgggttatcttgcattgtttacaattgaacagtggttcatcttagcagtcatggtttatttatactcacttttattcatccattccactcatatatattgagttcctactttgtgctaagaagcagttcggtgtaataccaggcccttcacttttacaatcatgaagtcaattaattataagctcaacccataattaatatactcttagtaaaggcaaccattataagtacattctgatacaacattctatccatgtataaacttaagagagtataaggatcagaattcgaggtcagacccacaaaatacagggaaaaaatgacactatgacattaatcttctccactcctcccccaattgtatactgaggaaatgagttcaaataatcattaatagcaaacctgaagtagtaaaagagaccacagaaaaacagacactatgatagataaagaggattgaaggcatctgctgggtgtcaaagtttgccccaggttaaggatgtttctctgacctacaaaaagcttggactgtctgtggaacatccaagcaaatcaacaccagaataaaacatgctgtccactttcctcgccctcttccaagaattacttcattattcccaataaactaaatgcatttagttctgaaatgaatgcatgttattcaataagaaaacattatgactcaagtagacctacacttcttttctgaaactagatttctgtgctctgaataaaaatgaacaattcatcagcacacatttcttcttaatctaaaaggacaacattatgcaaattcaggccatgggggtgtgaccctgtctatccttacttgttttgtttgtaagtaaatttggttcccctttgtgttaaagtgtaacttttttttaatgagaaaaataacttttgttttataccttcactagaggaagtactgtatctcagccatcccagtcacaatgggaacataagcatggcctcctcagtagaaactcattcatctcttatccatataggtccctttcttccatctgctttttatttggaagcactcattcttatctccaacttccccggcctcaaggtagtaatgttaggtaacttgcagtgatagctacttttgaccactttctccaagttccagcatcctgtaaattcatccatttaggcccacacaatatgtctacctccctagagaatgttccatgtgaacttcttttaaaatatcatactctcttttctgtaaaagcatatggaagggattctgtgacgatttaaaactaaagccacaatgcaacttctaacttaaaccagattattgcaaggacagcaataatcaatcacaaagattaatttaacagttgacctttttatactgttttatggatttcagcaaccatatagcaccacaatttagaggtagccttaaaagaactgttttctgcttagcaatcagaatctaattttagaattcctactagaaaaaaatatgagtatttttatctcattgcctggcgcatagtcggtattcattatgcttggaaaaaagtattactaggggtctgtgaaaagcattttgctacaaacgcttcatcttatcctttgggagaatcagaatattgcatactcacctgttggaagggtgccgatagagcagagtttgataacaccaagaagacagagaatgaaaccagggaaacattaagaccttcaggacgacgaggaaagatagctgatagccggaagaagacaatcaagattaaaaaaaaaaaaaatcacactttcagagaataacttaaattttaatcttttggctccaaagaaaaagtgacggccatggaataattttctgatttggccagtaaatcaggcttaacacctgctctagaacctaagcatgctggatatgacaatgagacatttctgtagctgagcagctttgtaaataattgggacaaaattctataatcatagcagctgcttcattatgtcctgataagctgcctaggtaattaaaatgtcacacatgatgcaaggagtagattgattttttttttttttttttttgagatggagtcttgcactgttgcccaggctggagtgcagtggcaccatgttggctcactgcaagctccgcctcccgggttcacgccattctcctgcctcagcctccccagtagctgggactacaggtgcccaccaccccgcccagctaattttttgtacttttagtagagacggggtttcaccgtgttagccaggatggtctcgatctcctgacctcgtgatccgcctgcctcggcctcccaaagtgctgggattacaggcgtgagccaccgtgcccggcctctgctgtatttcttaaagttagatgttcattctcagcctcacaggacagaattctaccgttaggagtcatgaaatcagtggtgggaagcttgaccacacaaagtctatatggctctgattggtggctttgccaatttagcggaaataggtcttgtttgtatttcctaactagggctgagtcttctctttgaggctcagtacagaaacggatgatttcttatcctttctaatatcagaggttcacaagccactatctggagctcacaggagccatacaccttttggttaaatagccccctaggatgcaaacgtttttctttctttcttttttttttttttttttttagatggagtctcgctctgtctcccaggctggagtgcagtggcgcaatctcggctcactgcaacctccacctcccgggttcaagcaattctcctacctcagcccctcgagtagctgggattacaggtgtgctccgtcacacccagctaatttttgtatttttagtagagacggggtttcgccgtgttggccaggcaaacgtttatctttctcaagcttctcgtagttagctttttcttactggccctgattagagtttactttatcttacccttaatagaacctatactagttctgacagctcgttttgccctctgcaatgaaattgctttgagaattcaccatccttcatgggcttgaaatttaaagaacactctatgggatgaagttgtataaatgattggttgattgacttgtggagggagtaattgtgtgttatgagggtgtgtgtgcacatgtgtatgtgagtgtgcatgcaagcctgagaatgttgtctctagtgtaacacagcatcacagatgtttgggatgctatagcatacagcacaaaaaataaataagaatttgtaacatgttctaggaagcacataacaagtaaatagtaagtattccactcagatttgttattccacccagaatgcacagttgatgcttcataaaacagggaaaaggtcttcatagaaaaatacattcaatcggccaggtgcagtggctcatgcctgtaatcccagcactttgggaagctgaggtgggtggttcacctgaggtcaggagtttaagaccaccctggccaacatggtaaaaccccatctctactaaaaataaaaataaaaaaaattagccgggcaaggtggcacctgcctgtaatctcagctactcaggaggctaaggcaggagaatcgcttgaacccaggaggcagaggtactccagactgggcaacaaagcgagacttcatctcaaaaaaaaaaaaagaaaagaaaaagaaatatgcttagtactgactggctgctgaagcaaaagcctctccaagccatcacgtggacacggctggatggcaggttgtgtttatgtctatcttccaagaagctctaataaagcgtgcaacactgacaatatccgcttacgttggcttagtattgctatttatattgtaaatagaataatgaaattttaaggccaggcgcagtggttcacgcctgtaatcccagcactttgggaggctgaggcgggcggatcacgaggtcaggagatcgagaccatcctggctaacacggtgaaaccccgtctgtactaaaaatacaaaaaaattagccgggcgtgctggcgggcgcctgtagtcccagctactcgggaggctgaggcgggaatggcgtgaacccaggaggtggagcttgcagtgagccgagattgcgccactgcactccagcctgggcgacagagagagacaccgtctcaaaaaaacaaaaagaataatgaaattttaaaagatgtcattatagttcttggagtcgagacacagtaaaatgctttcttgccctattcctaagaggcttcataattgttggagctataaatcaaagtgactctcctcacattgtcttcatcccaaccttagggactcaggccgtgaagctcagcactgcagtccatttccccacagctcactgaatgtagattgacttggggagtgctgcttcctcacgatttcaggactagagatggtgtcttagttggtctgggctgccatagtgaaagaccacagactctggatcttagcaacagaaatttgcttctcacagttctggaggctagaagttagagatcatggtgtttggaggtaggttttttcctgaggtttatatatggtcgtcttcctccgcacgtcttcacatggccatccctctttgtgtcccggtgtcctaatctcttcttcttcttctttttttttttttttttttttgagacagagtctcactgttgcccgggctggagtgcagtggcgccatcttggctcactgcaacctcaacttcctgggttcaagcaattctcctgcctcagcctcctgagtacgtgggactataggcatgcgccaccacgcctggctaattttttgtatttttagtagagatggggtttcaccatgttggccaggctgatcttgaactcctaacctcaggtgatccacctgcctcggaattacaggcatgagccaccgtgcccggccatctcctcttcttaaataccagtcttacatggaattaggggccaccccaatatccccattttaacttagacacctctttaaagatcctatctccaaatacagtgacattaggagtttacagcttcagcatatgaattctggaggaacatgattcagtccataaaagagagataaacggatatgtgactgagaatgaggaaagacagaattctgccatcaggaatcacaaagtcaggggtcttcagatgtcactgggataaagagaatggggcagtatggaagcctatgatacctggagaggaggggacccacatagggccagaataaagaaataaaactccttctggccaagcaagacatctgtgggctgagaccatccgttttctacccctgctgtagagtttctgacagctctgaatgttaattgaaagctgcctggactggcatttgtggcccagctggtgttttcttattttgtgtttgctttttgatggatgatgagtgttcagtttgttatgagattctggggaggaggggagctgattctcaggccatatttagttcttagatgtatatttaggtccaaaaggtaaaatacataggccacataatttcctgagacatttgctttttttctatacataatagaaagaactcatttctgcagactgaactaaaacataaggtgatagatgtttgcacgtagttaagaaatcaggcaaattgttcatgtgccagataaaatgttattgaactcttagtccttcagctgctgggacagatgggcagtaggtttcataccacgtgccaagaagtggctggctggaggcctgtgatgggagggattctgaggtttagactggacatacaaaagatcatgatctcattaattggccatatctgccaagaatgcggagagagggtttgcagcattagaacatgatggcacaggaatcaaagcaactttccaggatactcttgtcttgggtaaggtccattgtgacttcagatacataaatcccttgctttttaggtacaaaaaatatgaaattgttctggtgttttattttattattattattttttgagacggggtctcactctgtccccaggctagagtgcagtggtgtgatctcggctcactgaagcctctgcctcttgggttccaatgattcttctgcctcagcctcccgggtagctgggactacagacgcacgccaccatggctggctaattttcgtatttttagtagagacggggttccaccatgttgaccccgctggtctcaatctcctgacctcaggtgattcacctgcctcggcctcccaaagtgctgggattacaggcatgagccacgatgcctggactgttctaccattttttataggcccaacaaactcaaagagagaatgaagcattttgtctggcttagacaaaaaatcatgtgaaatataagaagcacaaaaacctactctacggttttaatatgaaatccagagagacaaatgcttattagttttgttgtttgtggggttggtggttagtattttgcgtttctgattttttaaaaaattttctctataataagcttactgatttttcctcttaaaaagcaatgttctgtgggaaaaggccaaccttccttggcactgccttctttttctagagattattaatttctttttaatagagctcatactgcaaaatcaaatttttatatcgcaaagggatttacatttatcttgagctgcacactcttcgtctatcaaattgagtttaagtttctaattgaaacaatttttcaagtgttaagcaataaagaagcaataagtgatatatttaaattatttattcatcttatttataattaattcatttttttccttgctgcacagtgaggctaacctgatgcatttgatttttcaaatcttttctatcatttggcaacaatagaagtggctgctttttccatcccacttgtgtttcattggtctttggggactcaggcaacatcagtttaaatcacagttaaacttaacacagcaactttgttttgcgatatactgcaccaaaaacaagtgtgttatgagtaaagcacgcctgttcttagtcaaattggaaaaaaaaaaaaaaaagtacctcttagtaaagtgaaccattgcatcaacaaggatctcaaccttcagcatttaatgactacttatcccttggtctatactccttctacacaataagattgataggcctttaacatgcactgtgtcatggatcatcaactagttgacctggatagctggtctgcaaattatttgaacccctttttccaatatctctgtcttgttatactattcacaacacaatctctcggctccagttgaatgcattacctcctccatcacataaacttattgcctgtccaaaattgcctggactgataatcttcaggcctgttcttagtcaaattgaaaaaaaaaaagtacctcttagtaaagtgaacaattgcatcaacaaggatctcaaccttcagcatttaatgactacgtatcccttggtctatactccttctacacaataagattgataggcctttaacatgcactgtgtcatggatcatcagctagttgacctggatagctggtctgcaaattatttgaacccctttttccaacatctgtgtcttgttatactattcacaacgcaaactctcggccccagttgaatgcactacctcctccatcacataaacttattgcctgtccacaattgcctggactgataatcttcagagctatgcagccactggatattttcctctcacacaaacacatctatcccattcactacaccatgctctggctcacagccctataatctcactccaccaagtgcccaatggcagaggctccaacaacttacatatactacccacaattttttttttttcgaaatccaaggtcatattcctggactgttcacaagctatagtgattccccttggctaactaaatatgctcaagctccccagactcctatttatttaggctggatttcacctttgcaccctcatccagcactgcctggcaattagataacagtgaatgagggcgtctatgaagagtgtactcacaaactttcattaaatagtaaccacactttatatgaatctttgctcctcacacaacagctgactttcactggatgctcagtacacatctgtagaacaaacgacccaagaacaggccataaaacaaattcagagaataatcaggggaaatctagtgatctgaaactcaagtcaaaaactcagaaaatatgatggccaggaagaagtcaatcgttgtctaaaattatttggaaataactgattgtgtagtaatccagttttctttaactgcagatgcctcagatgatctgattgtttggtatttagtgggcctcagtatgtttcatgtatcatgaaaggcagggagagggacttttctcaacctcaagggtacagcaactgtgcagtgaggactagggtgaagtatgagaacaaaaacaaaagcaattataattacaggcatttattgagcttctcctaagtgtcatgtaggtacaatgtactatccattttagcttattcaatcctcaaaacaatcctgtgaaaataacaagagtacatagctactaagtcacaatggaaaagtgtgttcttgtcccaactcttcactccctttcctgcaggaggccatatgtctatacacgctgtgtgcagaaggagtctacttccctgcttcattgacatcaggcttggccatgttcctgactcaggccaatagcatgtgagtggacatgacatcggcaaatccgagcagaagttttagtcattgtaggttcccaaaagatgagggtaaaatggcatgtcccagagaaggctgtctttaaagtggttcccagaatttgcacacttgtggccaacagtcagtccaacacgtaatgtgagcacaaaataaatctttgttgtcattgatcacagagactataggggtgactggcactacacaaagcttagcaaaagtagtggtagaattcacacccagagcctgcacttttatccatgttactatgctgcctcactaagcatacatgcactattatgagacaaggttctaaatctatgtaggcaggttctgctgtctctgtcttgcaagttggaatcagtcagctactcaaagtatggtccatggaccagaaacagtatgagtaatacttgacagctggttagaaatgcagaatctcagctcccacccaagaatctgcattttaataaaattcccaggaatgaatgtcacaataaaatatgataagtgctgatttaacacatggtcatggacgcatatgcttcatgaataatcaagatcaaagagctatgaattagaaatgaaaaaaagcatccacttccaattctattttccagattggaaagacaagagtatccacttattttccttgtctcttggagatcagaggggtagaaacaatgtgttgtaactacaatggtttactgtaaaacattctaggacttgctctagtcactaaatatcaccctttgatagagcagcttacacctcattgctagtcacgctgacctcttgttcacaatccaatagcatgttcattgaacaaataaacattagggcctatttgtcttcattaaggactgtatgcttgtaggggaaaaaatgacacattgtgcttatcttgacttccctgttccaagatcccattattgtcttatcacccttttgatgagtgacattgaccattaaccatatcagtaaacatcacagcttcctaaacacaagttctcatcataattaagggaggaatataacacttatggatgctgcttagccggtaattcaatgtcatggtctcttctccacactgttgcgaaacccagtagcagtgaaccagaacatccaagaagtaatggaaatgaataatgatatttcaagatggtggatgatgtaggtggaacaaccacttgtgcatttgagacacattctccccagtgaacactaaggtttttgacaggctggtttatgaataaattcatgacatgagacatttccaaaatgtctgttaagaactgcttcaaaatgaagtcatcaaaattactgcaaaatgtacattttaaatgcaaacagccaggggaaagagtgtacttgttatgtagaattcattatctttatttcggagtgcagccctataaacatttgtttgggattgcttttatgcaattgtttggaacataagcagagaaagagctgaatggagacattccagaaacccagagcttattcagcttcttttttctctaccttgatagaaagaaatcatttttttcttcaaatttaatacagttgtaaggatctggtgttttctaatttatcagtttatgttgttaatagtggggacattaccaaaatatgaaaaatggaaaccatgtactaagaattttatcttgtcatctgggacaaaaaaaaaaagatccttcattagatgcacattactttttttaggtatttaactcacaatgtaagtatgtgcatatttacagaagatagtaatactatccttatgtttgtaattgaattcagcctggagccgctttaagatgaatcagactatcaagttagccagcagatttagggtcaaaaatatactaagtgggaaaaaatgttcttaatacagaataagctaagtggttagttaaggactaaaaacaccactgctccaccacgaagaaggaaatatgcatttgatctaaaagaagaaaagagttaaaatccagtataccatcaagacaaaagaaaacctatctgtaaaaaaaaagagaatacaaatcatcacagacacaccctaaatgaaaatgccaagtagtttcgattgcatgaaatttattaatgcttatatatcaataaagctcaccataaacaaaattaaaaggcaaataatgacctttgaagattatacataccttttaaaaattaataagcctagcatttataaaagcttgcaaacctatttttcaaataacacaccaaaaaagaaatgagcaaagcacatgaattggcaataataatatttcaggaatgacctgaatctacagtagaggatcagctaatagtagcagatacatacgataaactaggatgttgtcattataagtgtaatatggaagaacgtctactgatgtgaagaaaatgttcatgaagcagtaaaaaaagaataaaacaatcacctaattgtaaatgtttaataaaagacataccagactgttagcagtatctctctacattgtagaactacaagagttgcttttttgtgtgtttcaagtgttttacaaacttcacccattcagtatatattgctcttcaattaaaaataaaataaaggtcatacaaaattaaagagattaaaattagaacaatttagataaacaaatttaccataaaaacaggaaaattccattcccaatgctataaaactatagcctaagccattaaaatgttttacttctaaaattaagctactgacttttggaaaaatgttattaccctataaagacatttttagatatccacagttaagtttgtaggcaaaggatggtattgaggtgtgtaaagagaaagcttggaccaaaaagaaaattttatttttttaattgagagcctgtgtttgtaagtaacatcagtgattcccttaccaaaatacctgttttactctgggagtgaaatgagttaaaagaactagattgctggggctttggggtaggtgatgcttcctctctaatttgaatctatattgccaataggtaaattgagagctaacacattaactcaaatttattgctgacattaccttccctatgcaggaaaatcaataatgaatatacattggaatagctgattggtgaaactcagagaaaaaaaactcaaagtaaattattctacagtattagattcttattgccactataacaaattaccccaagtttggtggctttaaacaatgcagatttattctcttacaattctggaggacagaagtccaagttcaatttcacagaactaaactcaagatataaactgggctgcactccctttgaaggaacatggggaatatctgatttccctttttcagcttgtaaagcttttccacctcataaagtctttttcagcttgtaaagacctcttgaattccttggcttatgagagacacatcattccaacctcttattccatcatcacatcttttactatccttctgatctcctgcctttctcttttaaagattcttgtgattacattaggcttaatagttaatccaaaataatcttctaatctcaagagcctaaatttaaatacatctgcaaaattcctttagccatataaggtagcatttacaggttttggagacagtacactgctttggtttgaatgtttgtcccctctgaaactcatgttgaaacttaatccccaatgtggcaatattgaaatgtggacttttaagaggtaatccatttattgattaatagattaacgagtcagtggattaatagattatcacaggagtgacattagtggctttataagaggaaaaacggagacttgaacaataactaagcatcctcaccatatgattccctgcaccacctcaggactttacagagtccctcactagcaaaaggacctttcaacaaaatgcagccccttgaccttggacttctcaacctccataactgtaagaaataaattacttttctttataaattacccagtttcaggcattctgttataagcaatacgaactaagacagaaaattggtaccaggagtggggtgttgatgatagtgaacacctgaaaatgtggaagtggctttggaactgggtaatgggcagaggatggaagctgagggagcaggctagaaaaagcctggattctggtgagggcttagaaggcaagaaaactaagggaagtttgtaactccttaggaattggttaaatggtggtgaccagaatgctaatagagatatggccagtaaaggccattctgatgagatctcagatagaactgaaaaacaaggtattgaaattttgagtaaaggccattcttcctataaattggcaaataatttggttgaagcgtgtccctgcccaagggctttatggaaggccaaacttaagaatgatgaactaggatatctgacacaaggcatttcttctttcttctttcttactttctttttttttttttttttttaaacggagtctcactctgttgcctaggctggagtacagtggcacaatctcggctcactgcaacctctgcctcccagattcaagtgattctcctgcctcagcctcctgagtagcttggattacaggcacacaccaccacgcccaactaatttttgtatttttaatggagacggggtttcactatgttggtcaggctggtctcaaactcctctttctttctttcttctccttttttttttttagatggagtttctttcacccaggctggagtgcagtggcttgatcttggctcactgcaacctccgccttcagatttcaagtgattctcctgcctcagcctcccaagtagctgggattacaggtgcccacccctacacctggataattttttgtgtctttagtagagacagggtttcaccatgttggccaggctggtctcgaactcctgaccttgtgatccccctgccttggtctgacacaaggcatttctaaggaaaatataaaaggagctacatggttacttttggctgcttatgctgatatttgggaccaaaggaataatttaaaaacataatttataattaaaagagaaacagaacagaaagatttgaaaagctctcatcttggccaagtgaaaagttaataagtgtgttcaggagagaaaatcaagggtgtagctcagagaccatttgctaaacatattagtatgaatagaagggagccaggtgcttttcctcaagatagcagaaaaaagagatcctgaaggcattttaaagatcttgaggctgcctctctcatcacaggcccagaggcctaagatggcagaatggtttcaggagctagaccaagggcaccctccataggctcagtgcccaaggccaccagaggactctgtttcctgcactccagaacggtgctccacaactgccctagttaggctcaagagaccctaggtatggcttgtggcacagctctggaaggaatacacatgtcagtatacatgtagcgctaattctgcaggctcttggcagcatgcatgtggtgctaattctcaggtttgcagaaagcaagagttgtagaggattggcagcctccacccagatttctaaggatgtcatcaaaagcttgggggcccaggcagggacttgtcacagggggggttgccaccacaaagagtttccactagagcaatgctgtatgtaactgtagggtcagagctgctgcagagtccttaccagggtaatatctaatggagccatagaggcaggacctccaccaggatcccaaaactgtggagtcaccagtagcatgcaatgcccacgttggacagcttcagggaccagacttcagcacatagaagtagctgcatgggctacaccaagcaaagccacagggacaggactgcttgaggccttgggggcccaactcccaccccagtgtctcggaggctaaggtggagtcaaaggagattactctcaagctttacaattaatgtctgccctgctgggtttcagacttggttgggactagttaagcctttctttttgcctatttatcactttgaaaatagaaatctgtgagtctttctaggtaccttgaaagtagacaacccgttttgatttcacagactcacagatgagactgtggactttcgacttccgagttggtgtggggataagttaagactttggggttatggggatggattgcatatatttgtatgtgagaaggacatgagttttgggggccaggggcaaaagcctatgatatcaatgtttactccctctgaaactaatgttgaagcttaatccccaatgtggcagtattaagaggtggggcctttaaaggtgatttggtcatgagggcatagccctcacaatgggattaatccattcatggattcatgggttatcacagcagtggcatttgtggcttcgtaacaggagaaagagagaaatctcagcagcacactcagcccttcaccatgtgatggcctgggctgcctcaggactctgcaaagggtcctcaccagcaagaagaccttcaccagatgtggccccttgaccttggacttgttagcctccataacagtaagaaccatattccttttctttataaattacacatttctagaattctgttacaagcaacagaaagcagactaatacagacatggatatcctggggaagtgacagcattacgcagctgaccacacctcacaactagacagacaaggtaccactaacagaattcctttccttatggcagcactttggtctgtttttgctgatattttacaatgatgaaaatctgttattctctttggaagtactaaatttagggtaagtcagagaagtcagtttctaagaggaaaataatactcattcctaaatttcttgcccctaaatttctttcctcaagtctccaataagtgctgcacagctgaaatctcatatgtttttcaaaataattatggaacatctgccatatggtagatacagatgtgatcactggcttttgctttacaaatgcaaatgatgcctttgacgttctcattgcctctgtttgccaagaaggcagtgaaatgatgagaactccactctgtcacgtgagcacacatatgctaccccattacccaccacaagtctgagaaaacacccagggaaggaccactaaagccacctataggagtgactcaaattctgttaaagcaaaacacaaaatgttcatgaaagtgaaagagccatgataggtctgatcaatcgtgtgatgttttagtgctgcaacaccctctagtcactgatctcgggcccccagactcccccttctctttcgtctctcaggttaatgatttagaaaggtgacatatgtgtgattctattattgttaaaccttgtagttggttggtgagttaggaattactagaatctacagactttagtatatatagaatatactggcatttatgtatagaatctgtgggtaatgaactccaacttggatagatcagacaggaaggaaaagaggaagggaagaatggggaaaaaaaaaacacctttatacctgtgtctggaccgttgagtgttgttggggaaaatcccacagctgggaagatttgtgtcacaataaatttgccgtcaccagcctaaatggtccttcagtgtctctaaggagcatcccctctcctgctctacaaaatgaccatttctccttctctaacctactcaagcctcagactctttactctcaggacccagtcttctcttctgcttaataaagaaaggggggaaatagctaaaaatcctttaaaccacccctccatcagcaccaagtctgtaaacactccagggaccaatccactcttccctcacttaggttagaatggagacagtgacctgtgcagtacaaggccactccccaagtcctgtccacagggataggggaggcttcctggagctctgaatgtggatgtggccttgctgatggagtgtggttcagaatcaggggagcacagagtccatgcaccttcctttaaattgaagcacagaaggttgtttttccagaggatcacagaaattcaaaatgcacgctctgcaggatgctttggttgccttccgcattccaacctttccctgatgattatcctgttcctcctggacccttgttctttccattgccattgcctctccactgactctggtcatcatttaggtaggctcaagtcctcctttcccagcagggctctctctgctcctaccaccctctgcctgctagcccctatctcccctccccgttcccagcacaccttcctggagaagatgagagcccccacggtttcattttctcatttctcagccactttgcaactcaccctaacctgcctcctgccctgcccacttggttttcgactacttatctgttccttctcagtcttctttactcagtcatctgtctctgcacaatcctgaaatgttgacatttttatggattctgtcctaggccttctgtatctgttcatgctacctgtgctctttagagacctctactatatccattgctaaattcccatctataagtcaacattcccctccatctaggactatctactgagctccagacttaacttcccgctgctacattgtaccccacccaattgtattcagaggtgtttcaagctgaccatgatcacacctgcacttaagctttctccttccccacccccataattggtctaatgctaatgtttcctaaatcagtgaaaggcacgtccactcagctgtctgaacgagactcttctaatattcttgaattagctcacttccccccaactcctagggagctgtcatgacctcccaaatggccttctagaatccacccttgctcctctcaaatccaccctccagtctgctacttctcttcttataataatctgatcacacagatgactgcccagtgacttccaagtaaaccttaatcttaatatgagccaagtatctcttaaaatctggccactgccaactttcctagctctctcttgtatgtctatctctctttccccctctctgttttgtgagggttccttctgtttgttcattccccctccatcctgccttctggctcatgaggctgaccagtaatcatgacatcagtgagattccatgccctctgacttttggtgtgttcagggccacaggagtccagacaggagactggaaggcagtagaagagtaaactcagtaactcattcccttggctcactccccaatgaacctacttagcttgttccattggtcaaccaaagtttccttccccttccaggttctgggaattacgccatgaccccttgacccctccaggcctaaggatggtggcaagtccatcatcacacagccctataccatctagcctgttgtcctgacactcagcccataccatagtaaatggtccctttattaaacacaatgttttctttcttttcttttctttttttttttaatggagtcttgctctgtcacccaggctggagtgcagtggccccatctcggctcactgcaagctccacctcccgggttcatgccattctcctgcctcagcctcccgaatagctgggactagaggcacctgccaccacgcctagctaatttttttatattttagtagagacagggtttcaccatgttagccaggatggtctcgatctcctgaccttgtgatctgcccgcctcggcctcccaaagtgttgggattacagacatgagccaccgcacctggcctaaacacaatgttttctaagatgagcctgccatctgtttcctgctggggatttactgcgatacccctgcctgctacacctcagccctgctgggctcttctcagatccttcagcacatcatgatttactatccctggaagccttctcactatgaggctggcccttctttcctgcctggcccacaagctagattaagtccccactgtggccttccaaggtgcattctactttgctgttgatatgctgcagaatgctgccattattgacgtgattgctttactgtcagctccaccaagtggggagtcagatctgtggtgccccgattctcccagtgcctggcaccctgaagatgcaaaaaaaagtgtgttgaccaataagctcatttctgtgagtttacctgacagagatctgatgatattttaaagttccagtctagctcttgcaatacaaatatagagttgctacacaagcgtctttgaatgaccttgggtaaaaagtcacataatttatttccaaatcctagaggtactcaaaatccacccttcattttgacaattatgaggtctgaaaaaattgtgaatgctacaatatgtacaaatacattcaagggctgtgtttctattagtttcatcaccctaagaaattagtgtttccgtatgtttattgcggcactgttcacaatagcaaatacttggaaccaacccaaatgcccatcagtgatagactggataaagaaaatgtggcacatatacaccatggaatactatgcagccatataaaacgatgagttcatgtcctttgcagggacatggatgaagctggaaaccatcattctcagtaaactaacacaagaacagaaaaccaaacaccacatattctcactcacaggtggcagttgaacaatgagaacacatggacatggggaggggaacatcacacaccggggcctatcgggggtgaggggctaggggagggaaaacattaggagaaatacctaacgtagatgatgggttgatgggtgcagcaaaccaccatagcatgtgtatacctatgtaacaaatctgcacgttctgcacatgtatcccagaacttaaagtataatgaatcaatcaatcaatcaatcaatcaatcaatcaataagtgtttcataggagaaacgtaatataaggaaaaacataaatattttattaggggtttattattattgaactctgttgctggctgaccacgtaaccatatagtgtccaaattccatttctgtaaggaaaacatctatgtccttaaacttgggatccacacatggcttctcacacctgcatccttccaggtcagcctcttgaggctttggatggacactaaggaaccagttcctatgcctggacttttgattaccccttaactgccatcagccaaattgcaggttcatggtcctcctgccttcgcaggaggtggggcgggatgggggtggagggcgagggggaggacaggcttcctgtccactcctcttggaaagcttctatgcactccctagacctgttccctcctgatcagtgagtgcaatactcctagttcttcaccaacacactaagaaggaaaaagcctttattcatttatagcaactgacaatataaagacccaaaggtcataacaaaataaaaagaagccatctttcaagtgggacagagaagtaataaaagtgcagttagaaccagagagtggtcaagctctggcaggagacaagagaagagagaaaaagggaagagggttgggaagtggtgaaaagggccaaaagcctgaatttctatccaccttcttctcttatctgtccgaggggtatttttacatattatagcatgctattgtgaggtatattatagttcatgaaccacagtgacttttagctccatgttcactgtgtggcttttgttgtctatagtagaaactgtggtctgctgtccagattcctacttctgggcctaagtacacatctcctcatctgctgagtgtgttgtttgcaaagaattcagagctgagtccttctatgacctcaaccaaagacgcctcctccccaaagacatcactcatccaatgactggtcaatgggtgttgctggagcccaactcaatttgggacaagtctgaatgaccatccagcttcaatgttcctcaaagggtcagctattaaaattattgaagcaatgggggaattccactgtccttgtatcagtcaacatctctactcaccagaccacaagaagaccaagaggcccaaaaatgcccactgaagattgctgacaacatacagacccaaagttcacaaaaaaatgaaaagaagccatcttgcaagtagaacagagaagtgataaaagtgcagctagaaccacagagtggtcaagctctggcaggagatgaggagagagagaaaggtctttgagattctaagtaggccttgggttaatacaaccatcatttttttttttttttttgagacatagtctctctctgtgacccaggctgcagtgcagtggcatgatcacagcacactgcagcctcaatctcctgggctcaagtgttcctcttgcttcagcctccccagttgctgagactacaggtgcaccaccaccatacctacctaatttttttcactttttgtagagacaggatttcaccatgctgctcaggcaggtctcaaactctgggttcaaacaatcctcccaccttgccctcctaaagtgctgtgattacaggcatgtgccaccatgcccaggcccattctcataaagttgaagaagactttggagattacacatggacctgctattcagtgtgggctggaattaccccaaaggcaaacgccatttgcagatgagctgacactctctgctttgttaggtgacataaccctcctggaccatcagctccaggctccttaacctgcgcctagcatctaacttctaccccagagactatcctacatgctcaccactgacccattcccatggtcaatctgattgttcttgaacaatctttgatgcccctcttcattggattagacccttgtcctgactgttagggcaggacaggggtctcatccaatgagatgagaccagagcatccacctagctctggcctgttgggattgatagcagaagttccagggttccccaggtcagcacagccaccaccacgataaaggcaagagacaacagctgccaccatgtcccaggacagactggtagctcataagactggacaaggggccgtgtcttggtgtgagttctccagaagcagatcctaatttgaggaaaagccgatctataaagaaagtagacagaagctgttgactgggggtgggacttcaaagcagggatgggaagtgacttcaaataggcatgagagatattttgggggtagttctaaaagggcgattgttgtacaactctgtgaacttgttaagaatcagagaatcatacagttaaaataagtgaatcctacgttatgtaaattatcgctcaataaagatgttaaacatataagaatgcatttcagaagtaggtaagtggctaagaaactgagccttgtaaactgtcagcctagaccctgccctgccttggactgcacttgcttcacttggatctgggtcctctaggagacgtcatgcttctgtcaactggcattttcatctttgttatattcatagcaagtcccctgcctatggtgatcatttaacaattatttgctgaattgaactctagtgggcaggtgcatttcccaggacatcaaaaagatgctttaaagaaaggtttaacagaacgcttcctcccagatggcccttgcacgtgactcactcacaagcactaggaaaagggcgatgacgtggctgtgaaaatgagacaagacatttagctacagatccagcaagtcatcagtcttcaggagaaaaatattagcagtgcattgcaccattgcctcctgacttcaggcgagatggcagtgtcgctccagaaggaacagccgtccccaccacctgctgcccagtaaggccagaggcagcaggcccctctgttgaaactatgagattacagcccatgtggctgaacttgcagacaaagaagagggctggagctgcttttccttgtagtctaaatgttactgtgcatctccttgtggaacaacattgatcaaacatagccttcaccctgatccaaatctgcgattcaccctctcagaagttcctgaggagctagaacgttgcaccctcaggtctgtgcacaggaaggagtgtgtggtaatcttcagggggaagaaaattatcttagaagaatgtaaattgtttctactccagaaatttgctgaaaagggggagagaagtcatgtaaaaagagatgaatttattagaagttctccttaacccagtaggtcccgagtctgttcctggtgggtagtctggtaaaccaggaacacaagaaggttgggtagagtgtttaagcttttgagtcagagagatctgggtttggatcctggccccatcactaattagctgacccagctccaacctccctggatttcagttttctcgcttgtccagctgaggtaataatgaaaatttttgtagctggatgtggtggcacatgcctgtagtcccagctacccaagaggctaaggcaggaagattgcttgagcctgagagctcaagaccagtctgggaaacatagcaagaccctatctctacaaaataaaaattaaaaaactatccagacatggtggtgtgtgactgtactcccagctactcaggaggctgaggatggaggattgcttgagccttggagttcaaggctgcaatgaaccatgatagtgccactgtactccagcctggggaacagagcaagaccctgtctctaaaaaaaatgctatagttataaaaataattttttcacttggggtcattgtatgtttgcaatgagaggctacaccatgatggggacattgtataggagatactcagtgaagggctattgaaaccccagataggaatatttcattcagttaaattaatggaggccctggcacagactgtcattaaataatatgggaaggctcagtgtgtccctagtcagggtttctcacatcctttccagtgggcttctgccagagaagacagagagtccaatgtcatcactttcatgctacagcgtgcagagtcaaggagcaagaaacagagcctccatgtgatatttaaatacaaacagacttttcgagggtgttatatattagccagaacccccaaattagtatttgtggctctgcatttcaaacattaattcaaatgattgcttcctttttaagcttttacctgttgagattaaatcctgaattgactcagtcaagtacctgataacctaccaaatacttgatgcttgttgaattttaattgatttaattattcttacaagttcatcaacatgaattctggaaaagaaagtgtgttctaaagagttttaacgttcacccatcaatgggcgcacgtggagtcagattctttccaccagaaattgggaagggggccctggagcagcagaaccaggtggtccatgctggagaagcagataaaggcagtctgcaaagacagaacaaaggctgatgcagacagaaaggagaaatcctcatgggtaacctggaggctgagagagcagttaactcagctttgggtcactttccaggcctagcctttctttctcattttggttttttgagaaatctttatctcccacagaacctctctgtgggctgagccaggctgagtagattgcgttgaagacctatggggtcccatatgggataggcacctgggaccactggaagtcaactttggtgtctgttccggcctttctcacttcttagtgcctttaggttgtgattcactctcactatgttctccaattgaggcatccttgcttcagcaaaaagagaatatttcttcttcatctcccatcttcctggtattggagagtagaagagttagcttacaaggagataaacaatagatcaggagaaggcatagaggtttacagggaaaataccagtgagtaagtgaagagtgaagtattctttagatgtgaggaaacaggtaagggagagcaggaatataacagatataaccagagaaacagaattgaatcagaaaaatatagcaaatcaactgagagccagaaatcgttaccatctgacctcataaactgccacatctcaaatacccagtcttagcaagaatatgttctccccttccatgcagcaggtactcaggtcaatgacagcaccatcacaccagtgtctgaaggaagtcttcctagataacccagcacttatatcttcagcttgggagtccatgcattctactgtcacactgtgcccagcacgcagacagtgacccctgagccacagctctcatcaagaaatcacaccatggctcccaagacacctaaattcccttccattacctgtgctctctttttggatacatgtgaaccatgactacccacactctcacggtatggctatttgtgggccacagagggagaagatggaacttggttaggattactagctttagaagaaaccttgagagttcgaagtggatatgtccagacaattgaacatataggtctgaagctcaaagtacagtaggaaatagaaagttatgggcacacatttatcattctagaagatgatgtagaataaagatagaggagagccttggtttgaactttaaggaattcacttaaaggtcacgcacaacccagttgatacagagactagaaaaataaaagaaggagggagaaagtgggaagttggaagccaaagcaagagattgtttcagtaaagagattgtggtcaccagtgttggaaactgctgtgaggattgaaaattgcctgctaaattcaacaatacgtatgtcactggtgatcttggggtaaattgttttagtgaaaggaatggcagatggaaattcaccaggtgttgagtgagtataggcagggagataagtaaatgggtttcgacatgtcttcagagaactctggctttgaaatacgaggagaaatacaaaaagctcatgcgcataaaagtgcagcctaatatatcctaaagagtataatagagatgatgattgataacggcacaaatgaaacaccatttcattccataaaaggctagggaagagttgattggatttgaacccacatctctctgacctaaaaaccatggttgggcaagagaacctatgagaccacacatatgttgattaatctaaataactgtggtatatgaagacaggggtattatttgggtttgatttgttcttgtttctctagttccttgaggtctgacattagattgtctatttggcactttcaggctttgggatgtcagcatttaatatttaatgctgtgaacttccctcttagcactgcttttgctgtatctcagtggttttggcaagttgtgtcactattatcattcagttcaaagaatttttaaatttccgtcttgatttcattgttaacctaatgattattcaagagcagattatttgatttccatatatttgtatagttttgaggatttctttctttctttcttgttttttttttttttttggttgagatggagtctcgctctgtcacccaggctggagtgcagtggcgcaatctcagcttactgcaacctctgcctccccagttcaagcaattctctgcctcagcctcccgagtagctgggattacaggttcccgccaccacacccggctaatttttgtatttttagtagagacagggtttcaccaccttggccaggctggtcttgaactcctgacctagtgatccacccacctcggcctctcaaagtgctgggattacaggtatgagcccctgagcacagccagttttgacggtttcttttggagttaatttccagctttatgaggggtatgaggcaggctcgattccctgaatcttttggtctcttgcagttttccagtggtcatcaatgcagctggaattcactgttgcagccaagcaaccacataatacccaagaggaagcagaaagcaaaggcattaatataagcacatgtgaccaaaatgcaactggagcatactaaacaacagctttatttgtggcctccagcatgggctgggatgtgccaactgtgtaattctcctgcgcatgaagaaccgcagaaccatgcagactctctggctctgcacaggtccagttgcactttttgtaactcttttagtgacatttttcaatatttaatctcaagctaaaattcttaattgcttactattgttgttcattaaaaatgtaagaacaatctgtgtgaagtcccacaccttagcgtagtagagaaaggaccaaagtgagaagtgcaaaatctctcttgaaaagatgtgctgtgacaaaagaaatactgcttctttctaagttacatctaatagctattttaaatgctcacataaacacaaggattgatgaggaagggagctgtctgtctctaccgtggtgatgctaaaggcttagcagcaacattgacaaatacatagatcattgttgtcaaggggttttagttaatcatgaagaagagcgggaaaaggatataatggaaaacgaagatgagacgttgacctgcagatgtgattgacttggaaccacaccctgacaattgcagaggcagaaataaaaacactgggaccaaccacaagaggcaagtaggtaatccagttaacaggaggaagagcaggtaactgaaatgtcaggagctttatgtactgaccttcgattacctcacggtaaaggaaaatattgaaaaggccattgatcttgtattcttattcatgaaaaacagcaattagcgaggtgattgcagtgtttgaaaatgtgatagcaatttacaagttcaaaataaaaacaagtgaagaaaagcccttgagaagggccacacatcaaattttctaagcatgatttgatctgcttcagaaagaagatgctgaaatgctgcagcccagtgatgcaggcagtgacagctgacagggtaggggctgaatggagaggagaagtcattctcaaccttcaggtcattgccattttgttagttccagttcccaaagaaaaaaggtaaccccaatctaaagagtgtttgtacatgatgaagggcctatcacttggtcattttctcagaacaaataggaagggacagactgccacgagataaggctattttccccctaaacaaagctcatttgtttccaccagcagcctccatccctaagccctcaacctgggctgacacagataatgccttaaaggcaggctgcccctcacacagacacaagaacctagtcagcaaatataagcaaatgtaggtccctttgtctcccaggataaagctggcaccaaccctctgctggacaaattaaaagacaaaattttccaccactaatcaaatctcttccatgtaatgagcaccactgtcttctagggcaactgtgattacgtccgttttccagatgaaatgctgagaaagtgataataatggaagtgtcacacacacccagggtgtgcttccttgttttcaaagtatttttcctaagttatggccgtttgctttgttgtttacgataattttgtgaggtagacaggatgggagatatgagtttagggatttaggttatcatactgttcctgaagtcaggtgatctgcattcaaactgaacacacacctctagtgaccttcagcaatgttctcaacctttctgtgattcagtttgctcatctgtaaaggggagagaggactacagtgagactgagatgtgatgatgaaagatcctacacagtgcctggcatttagaaagtgctcagtagtttgcagccatcatgattccacctgtcaccattgtggttgtcaccacagatgaggcaatgtggctgacatccctgagatcccaaagtcagagaggcaaccacaggcagaatccacagttcctgcttccaatctattatcccttcccgtctactagagaaacaatgtcaaaacagcaaaatcagtttctaaaaagtggggataacatattcaatgtgttttttaaataaatgaaagtcaaagtgctataagtgctgtacaaacgagaagaagtgtgatttgaagcttgagcaaaggctcagaaagggtcctaatttgtccttagttctgtcctgcaccatgtgatgatgaatttgaggtgtcgggatgctagatgcccttcctacccccaaataaaaagagggggtgaccttgggaggccaaagcaggctgatcacgaggtcaggagttcgagaccagcctggccaatatggtgacaccccatctctactaaaaatacaaaaattagccaggtgtggtggcatgcacctgtagtcccacctactcgggaggctgaggcagaattgcttgaactcaggaggcagagcttccagcgagccgagattgcaccactgcactccagcctgggcaacaagagcgagactctgtctcaataaaaacaacaacaaaaaccaggggtggttgatcctctgcatcaaaagatacaataacaggaggaaagactggtgctgcgatctgcaatagagatctttcacatcctcccaggaactgaagtcctagcccaaggggatacattttttttcttattaagcaacgctgctgggttgtcttcaaaatgaatctattttctgttgagtcttgagactatatgcccatatttattttttagagacccaaataatatttctaaaggtctcaatagactaaagtttccccaaaataaagctagaatacacctatgagaaaaagaaaaaaaaaattctacacatggcttcgagctcgctcttttttgacattctctaaagctgatgatgaactttggaggtgaatttcatagcctttaaaatcacgccattcacctcttcaataggtaaggattgaattctcattcagccaaataatgggttattcttatttaaagatatgcagtaaattagattcttttttttttttggtgccaacaattaggaatacatacttcctgtttctaagcaatttcaggtttaattaggattctctaagccccatttgtcttaacaatttgacagctccggcttccccttccacacccacacttttcctttttttacactctcccccgtttgtagtattttattccacataaatgccaggagggaaagggaagcaagcttaagtgcaaatcagatcgcttgtttcttctctggaacaggccactttcaaggcacctatgataaaaggttattttcccttgactgacaattatctctaagctaattattaaagtgtcttattaaaatgtgcatgtctgggggacttccaagggaagcaggatgaaatcccctggaagaagaatatgacatcacaggagtaatgtgcaggagagcgccctgtttgtccatttaaattagtttcatcatccataacaagtgtttaaaaagcagaaaagcaagcgtgatgcataatgcattgtgccatgatgcataataattaggcctgctccccgccaccccgtctcccaagacttaaaaatctctccgagtaagcattttgttctcaaggctttgacaaaaatgccatttagggactttcaaatttacagctaggcaatttgtcatcatttatatgacagagtagaaggtaaaaggaatataacactgcgtggttcatcacttcaagaagctcccggtggccgggcgcggtggctcacgcctgtaatcccagcactttgggaggccgaggcgggtggatcatgaggtcaggagatcgagaccatcctggctaacaaggtgaaaccccgtctctactaaaaatacaaaaaattagccgggcgcggtggcgggcgcctgtagtcccagctactcgggaggctgaggcaggagaatggcgtgaacccgggaggcggagcttgcagtgagccgagattgcgccactgcagtccgcagtccggcctgggcgacagagcgagactccgtctcaaaaaaaaaaaaaaaaaaaaaaaaaagaagctcccggtgatgaaagctccttgggcctcgatgtggtaaagggacatccgcctgtccctgcaacactgcctggatggaggcaccccgcccccatgcgatgtgttgttttctttttaaaaaaaagacaaagtcggccgggtgcagtggctcacgcctgtaatcccagcactttgggaggccgaggcgggtggatcacgaggtcaggagaatgagaccatcctggctaacatggtgaaaccccatgtgtactaaaaatacaaaaaattagctgggtgtggtggcgggcgcctgtagtcccagctacccaggaggctgaggcaggagaatggcctgaacccgggaggtggagcttgcagtgagccaagatcgcaccactgcactccagcctgggctacacagccagactccgtctcacaaaaaaaaaaaaaaaaaaaaaaaaaaaaaaaaaaaaagacaaagtcacataagatagttatcccacgcttgagcatttgctcttggaaagccaacgttaactgaaggtttagaaatcaatcttcagcttcatatatgttgcttcttctccaaccctccatggacactgaggttaagaacagaacaattaaaaatattctttactctaaaatagcattttttgaagatgtgataaaatctaagagaacgactaaatttagataatgtctaaaacacagctgaaccaaaaaaggaaagagatggtctttggaatgagacattgttactttaaaataaccacataattattttatataaaaagagctttttctggctttaaaataaaatttagatctgaagtacaaatgtagcatttcctgttgaagtatgacaggaaaccaggatttgaggtctaataagccctacacggagcccatttgcgtaacagccatccacccatttgctcaacactgactgagcacctaaggtaggctggattcttcactggggcccagggctatttgcccaagaaaatctaactgaggaaaaacacggaacacaaagctgattattttaggactggttagaaagggttaatataaatgatttaatgattgaatgattaatggagtccaaaaggcagactcaagtgaccagaaaaattctctttcagctaatttaacattttaccgtaattgaacacagattgcctcaaaccacagcactgtgctgggctgcacccaggcaggggagcttttcagccccatgtgaaccttccccagacagtgggggcagtctatgtcgtcaaaacacattattggattttcaccctataagatgttgagtctcaggaaacaacaagggccaaacacataatggttgtgtatacgttcccaattgcatacttagcattcactgagccataaatttaggaacataatgctaatgccatataattactaatcctcacaaattttgagtgtaaaaaaggcccatctcagtcaaccaacgagatcattgtgggccaagctgttgtgataaatcacgcaatctagcatggatatattgatctgcattggcttatatgcgaatttctaatttcttccaacattcttctcatgaatatgtttgccatgatggaaactgtctagagctgggagataggccagcttggtttgggttccagctccattccactcatattgtgcctcattaaagaagtcaatttacatctttgatcctcactcccctcttatctttcaaatagaagattttgacaggtaattaacaaaggtccttccatgtctaactgttgatggttctagggctctagggccttaattcccaagaacaggatatcatcatcaggaatgggataaggcaggaagttgacaatttatggagaaaaataatgtgtgtagggatatataaataaaggccccctgcttgtgactaaaaaaagctagaactataaaaagctcttaggtaaaaaattggggtcatgcccagcaatcccattacggggtatatacccagagggttataaatcattctactataaagacacatgcacacatatgtttattacagcactatatataatagcaaagacttggaaacaacccaaatgcccatcaatgataaactagataaagaaaatgtggcacagatataccatggaatactatgcagccataaaaaagaatgagatcatgtcctttgcagggacatggatgaagctggaagccatcactctcagcaaactaacccaggaacagaaaaccaaacactgcatgttctcactcgtaagtggaagttgaacaatgagaacacatggacacaaggaggggaacgtcacacaccagggcctgtcagggagtgggggcaaggtgggggagagcattaggacaaatacctaatgcatatggggcttacaacctagatgacaggttgataagtgcagcaaaccaccatggcacatgtatacctctgtaacaaacctgcacattctgcacaggtatcccagaactgaaagtaaaataaaatttttttaaattagggtcataaatatgtattacagaaaaaaattatcttatggttgaactccatagccatgtaaaaattcaaagaaaaaaacaaaaaatcaagagtgagtgaatttggataaatcacccagtgtggccctgagcctaactccattcaagatttatgcccacttaaacatcagaacctcccaggtttcaatgttaaccttaatttcctcattaagcaataacttctctagagcacaataatagattataatttattatgcttttaacttagtaaattgccttaaaatatattatcaataatttagtacagcaagttttttgtacccaaaccagatatccagacatatatatatatgtatgaactgtagttggggagggcttcgcagatatatatatatcttcacatatatatagatatatatatcttcacatatagatcttcacatatatagagagatatatatatcttcacatatatatagatatatatatcttcacatatatatatatacacactctaatttcttgaatcatcttcactgttttgagtttgtcaaattgtcttttttgacttttcacaacttaagagtcagtacatttttcattttatcttttagctctgttgcacacagctttgctctgagagtccttaaaagcttctcactgcagcctggattttgctcttcagcctccttcagatccattcagtctctagatttatgtgcatgcatgcacacacacagacacacgcgcgcacacacacacacacacacacacaccccacagcagtgctttcaatgcctagccctcttctcaaactgcaggacagcactgatccatgttccctaggattctgtggcaacagcttcacttccataaagccctcccgaagtacagttcacaaagcttcctttctcctctatgtttatatttaacatttttagctgcatccatgtccctgaaaaggatatgatcttgttcctttttatggctgcatagtattccgtggtatatatataccacatttttctttatcttgtctattattggtgggcatttaggttggttccatgtctttggagctggaggccattatccttagcaaactagtgcaggaacagaaaaccaaatacctactacgtgtcatcacttataaatgggagctaaatgatgagaacacatgggcacatagagaggaacaacacacactggggcctattgaagggtggaaagtgggaggagggagaggatcaggaaaaataactaacgtgtactaggcttaatacctggatgatgaaataatctgtacaacaaacctccatgacacaagtttatccatgtaacaaatctgcgcatgtatccccgaacttaaaataaaagttaaaaaaaaaaaaaaagaccgggcacagtggctcatgcctgtaatcccagcactttgggaggctgaggcaggcagatcacttgaggtcgggagtttgagaccagcctggccaacatggtgaaaccccgtctctactaaaagtacaaaaattagctgggcatggtagaacatgcctgtagtcccagctactcgggaggctgaggtgggagaatcacttgaacccgggaagcaggggttgcagcgagccaagattgcaccactgcactccagcctgggtgacagagtgagatcttttctcaaaaaaaaaaaaaaaaaaaaaaaaaaaagtctttttagaatgatcaggagctcattttataatctaactaaattggattattcagtttgtctccttgttttattagcttatattacctctgtttttttttaaaaaaaaagactttgttactttgtacttatctatgtcataatttcctaatgaaatggccaactaagaaaccatatttatactgtgcttatcttattccatattcccaatggacataaaataagcacagtaaatattttcaggttaatgaatgctctccttctaagaaagcccattggtgagtttacactggtttcatcttcggtcattaataacattagtaacattctgtatcatgatcaccctgcttagatagtgccagttcctcacaatctgtatcacgttgagatgggtatatacaatatgtaaaccctacttctctttattttcagtttttcaataagtacaaaactataactttttcaataagtacaaaagcaaagaatttacacataaacttcttataagaaataacacttcggcctggctcagtggctcatgcctgcaatctcagcactttgggaggccgaggcgggcggatcacttgaggtcaagagttggagaccagcttgacccacatggcgaaaccccgtctctactaaaaatacaaaaattagccgggcttggtggttcatgcttgtaattccagcggcttgggaggctgagacaggagaattgcttgaacccgggaggcagaagttgccgtgagccgaaattgtgccactgcactccagccagggtgacaaagcgagacaccagccccccagcaccgcccccccaaaaaagaaagaatgcttaatcttagcatacatacattgtgtgtgtgtgtgtgtgtgtgtgtcaataagtgtgcaagatgaggagagaaaggaagacagacaaggaggccaaaaacagataaaccataaaaaaaaaccattaagctgctcaacgaaaaagtgaggctgcagatgtgaaatatgaaatgaattgtaaattattttgaggtcaaagttacactaagttgaatcctgtaaatctcaattcaacttgtttaaggctttcaaaactcacaacgtggaacacatttttaaacttaaaatttttcaggatatgaatgagggaaaatggatatttgggtgataccaagttatactacataacaaaaaatataaatatttataggtgtgcttaacccttcattttctggttactaaaaacccaaatagctttatgctaacaggaaccaaaattgatcccaatgatttgtaaaataatagatggtgattgctacagtgaaacctcacccaaattcactgtcaatactacatttttgtatactttaatttcaagagaaatacaaaaaacagaagaaattaaacttgtcagttatgagttgattgaagctgattagcccttcaggatgtgccctctgatccatacatattgcaatgcagtcaggtttcagcatctcttgggttatgctgtgataaaattatagaataattctcatcaggtgttataaaatccctgtcaatgactccattctggcacatagtttgcagaaacgcaaatttcacagagtctcaaaagaaaaaaaaaaagtaggcaatattggcagtaattaaacacacaaggctataaaatctatccacagctttagtttaacggtaaactcacattgtgagacaccgccatggggataatctagacccaaccttatcagcagtcatgcttggatcatccccattgggctccctctgtcccccagcctcccacctaggtcagtacccagccgccatcactgtcctagtggcagatcatctcaccccggcaccgtggaattagcctttgcttggccacccttccaccaattctctctgctctccaatgtctcttatgtgcggcaaccaaaatactgcattgattgctcaaatagagatgagcattttaacacacgaatcttcaattcaattccatctaaatttgaattcaaatctttccacaatctgctccctatcccatttttattattgatttttttttttttttttggagacagaagctggcctcacttctgtcacccaggctggagtgcagtggcacaaacatggttttctgcaacctcaaccttccaggctcaagcaattctcccacctcagcctcctcagtagctgggaccacaagcgcaggccaccatccccagcttactttttaaaaaatatttttgtagagattgggtctcaccacgttttccaggctggtttcaaactcctgggctcaagcaatcttcctgccttggccccgtcaaagtgctgggattacaggcaccacctcgcccggcccctatcccatttttagatgtgtcttccaccatgactttgcacagcagcttgatagaattctgtgtctctccctccacacccggggacttccctcattttcctcttttctcctgccaatcttttcactgcccacgtttcccagtcaaaagcatacacaaccttaaaagtaaagtttttaaatccccctctctttgaagccctttttaaataggctaatcagaagttgttttctgcttccataaacactgcagagctttctctgtatgtccgacatggtggtcattattgggtacacccttttagaagctgtgagcatgtcctattgtcctggagactttgccatgacccagaaaagaggaagttgttttgtttcttgcacagtcgttaatatagtgtttttttctcatttatttattcaacaaatatggagggagcaacttacgtgtcagtccttgttctaagaactgaagatactacaatgggcaacacaaaatccctgctttcttggatgttacagtttagtgcatataggtgttcagtgaacattttctttctttccttccttccttccttccttccttccttccttccttccttccttcctttttttcttcctttctttctgagatggagtctcgctctgttgcccaggctggagtgcaatggcacgatctcagctcactgcaacctctgcctcccgggttcaagtgattctcctgcctcagcttcccgagtagctggaattacaggcacttaccaccacgcccggctaatttttgtatttttagtagagacggggtttcaccatgctggccaggctggtcttgaactccccaccttaggcaatctgcccacctcagcctcccaaaatgctgggttacaggcatgagccaccgtgcctggcctcagtaaacattttcaaaaatttttgaaccaaatatctttgtattcctcaaagtatatacaacatatcagaaattacatgggtagtcaacaaagattttttttttaagtaaggggttttattgttatatcttttatgggtgcgtgagagttgagaattctagggcataatgcttgttgatcttttaattaaaatacaagtgcagatcttccaaatgcagaaactattgtcacacagagatatactgtcattccatcagaaatataaataaataaagtagaactgaagagacagcaatgacatccagtccctaagagctatacattgctttaaacaacattcattggtttaattattcaatcagtaactacttactgggcacctgcagcctgttagtcactcttctaggtgagcacagtagacaaatgtgggcttccccagttgggagagacagatgataaacttctaagtatatgattttaagtactctgacttccacaaagaaacctgaagcatggcaaggagaaactgaacaatcaaggaggccactttgttttagatcaggtggtcagggagacctctcttaggtggtgatatttggacagagaactgaaagaagtgaagaagtggggcgggaaaaggccagggtagagcattccaggcagaacacgcggccagtgcagtgctgaggagaggaccagctcagcaagctgtagaaacatccaggtggccagcatggctctgtggagggggtggggtgggccagcccaagccaggccatggaaggggtttgaggtgtaggcaatgctgtgtttattttggggatgaagggagaggctttggaaagaggagtgatgtaatctgctttatattttgaggaaatcccttggctactgggtggaaattcagctgtgagttggcagattatcatgatagtccaggcaaaaaggagaacgcagcttgaaggaatttaaaggtagaagaaatggtcagattcttaaagtagcatcactaggacatgctggtggtttgaatacaagatgtgaaggacagagaggaatcaaggacgactctgagatttctgttctgtgcagtgagggacgagcgatgctcagtttgaatgaccaaaatgtgagatagaagtggttacagggaggaaaatccagaaggcctccttcagagagtttaaatgttgagatacctgtgagttttgtaaagggatgttgagtaggcagctggatttcaggatctggatttgagctcagagaagaaatcatggatagagatacgaatatggaagtcatcagcatagagagggcatttaatgccttgacctaaattaaattatatagagaggaattagagagaggaagggaagggaaaggaagcagagaggaaaggagaggagaagagaggggtaagaattaatccctggagtgggctgcaacatttagagtctaattagagggaagaagctcaccaaagacactgagaaggagaagccagtgaggcagagggaaacccagagagtgaggtgtgcacggtccaggtgaaggtgtttcaggaagggaagtgtgatctgttgtgtcacagctgctgagagagtgaacatgaggaaatctagaaacgtggcccatgtgtggtggctcatgcctgcaatcttagcacataaagagacccccatctctgcaaaaaaattaaaaattagctggacgtggtggtgcagcacctgtagtccagctactcaggaggctgaggtgggaggatcactcgagcccaggagtttgaggccatggtgaactgtgattgtgccactgcatgccagcctaggccacagagtcagtccatgtctcaaaaaaaaaaaaaaaaaagaaaagaaagaaagaaaataaacagaaaaagaagactagaaatgtggaagtcatcagcctcattgacaaaagcagattcaatggagtggtgaagaagacctgatcagtgtgtgttcaacagagactgaaagatgagagtgtcaggtgagttgaaacagcgctaatcgaagtgtgtacagaccagctgcttgtttcttgtctacagtgagacaagcacagaaactgagaagttgctgcaacattcaagggggtgatcagtgggctccattctcaggaagggcggtacaggcaactttgtgtatcgttcaactcatgtgataagaagcatgagcaacaagctgtgtttgaggcaagtactgtaaggacctcacatcaagctgcaacagattggaaaatgaaaaactgatctttcagcacagttagtttgagaagcactagtatactcaattctttccagtagttttactattaaaaagtatcagaggaattggatggaagaaggaagtggtgacaagatgggaggtggtggttgttagtacgttttacagtggtagggataacagagagaaaacagaatgttgatatgctgagctggaagagggggaagttgaggctgagataaaatgcaagggcaggactgatgcagtggctcacacctgtatttgcagcactttgggaggctgaggcggggggactgtttgagcccaggagttcaagaccagcccaggcaacatagtgagaccctgtttctataaaaataaataaataaaaataaatacaagggcaaagtctttaagcagatgggagatgtggaattctggacatgaatggaggtttcagctttcaacaggagcaaggccagggcttccatggtcacagtagcgaaggtcatgtgtatgggtctggtgtgggacctgagattaaggttccatattgtgttgctgtgaacgggataaattcagaagagcctcaaagggcttacctgctagttctcccccacccatgagctgtcatggataaagtcccctagccaaatggcactccgctcatagggaccaggcacagtgcctgcttacccatgagtagtgggcttcggtctcccgtcagcctgtggaatcagccaaataagccaatcacatcctccctcaggaaccaggggacaccccaccctctttttttttttttttttgagacagtctcactctgtcacccaggctggggtgcagtggcacaatctcagctcactgcaacctccgccttctgagctcaagtgattctccagcctcagcctcccaagtagctgggactacaggcacatgccaccacacctagctaatttttgtagttttttagtatagatggggtttcaccatgttggccaggctggtctcaaactcctgacctcaggtgatccacccgcctcggcctcctgaagtgctgggattacaggtgtgcacacacggccaccatcccttcttgttactacaaggtctgcttcccgcagcccctgctagttcactctgtatggcctgccctgtcctactcccctgggctgtgggaatacttgaatgcaacactgctgtcaattttatctgcccagggtcatgtgttcaaccacccctataactgaatcccccatcatcagtggggtgaaagggaggcaataaaaacaggagtggacgctgatcacatgaaaaattgagtgtgtgggtgtgtattggagagcagggaatagtccaagtattcacttgattcttcggttttctcagtaaatcatatgaggttatcgactcagagtctgggaaaggaaggggagtttgaggtttggggaggtgagaaaggtgtgaagtagtcttcccacagacacagaaatcaactagggcagtgaggtagattgagggcagagctaagagcccactcgaggtttgtggtcatgcataatgagaccagtcagagcacagtgtgtgcagcgagagctccttggtcaagtgcagctgctctgatgcaatggcagataggctggggctgtataatcaggtatatcacaaagtctatagtctctgagacatgggtgagtaggtgtgagcacctggtgaaacaggtcagaggaaaagcaagttggcgttggagtcagctgtcaagagatagatccgtgatggtatcgagatcactacagacaggtggtggtcacctagtgttgtctgctgaaatttggagggtttaatttttaatccaaataccatagaaatggatatgaaaagatgggtgacacatgctgcacgttgggaagtggggatgaccaggtgcttagttgcatgggagaggccacaagtgcttggcaatgttttcgtgactgagcctctcatctcaggaatgagctgagattccagaaatgctgggatgaaaacaaaccaaccctgagactcccaaattgttctcatattgccacattttttcccacatcttccttcagaaaagcttaagaaagccatgtttgctatctggctcctcttaactctccccataacttacatttccagttttccagataagcatggccatttgtgttaggtcattcttgcattgctataaagaaataccagagactgggtaatttataaagaaaggcggtttcattggctcacagttctgcaggctttacaggaagcctggtgctggcatctactcagcttctaagaaagcctcaagaagcttacactcatgaaggaaggtgagaggggagtaggcaggtcatagggtgaaagcaggaacaagagagacagggagtaggtgggggaggtgccacacacttttagatgaccagatcttaagagaactccctatcatgaagcacagcgccacgccatgaaggatccctcctaatggatggcgccaagccgtgatccaaacgtctcccaccaggccccacctccagcactgggaattacaactggacatgagatttgggcagggaaaaatatccaagctatatcaccactctaaatagtatgtgcactcagaaaccagctgacctatctggggctcattcatccaggaagacagcctggaagtcaagtgcaggagttctggaattagactgcccgggttcaaatcctgcttccaccccggctcaatgtatgccttctctaggaaaggcattcacctttgtaagtcttgaatttccgcaagtgtaaagtggaaataataccaacaggcacctcaaagacttgtttgtcaattaaatgggatggtagaaaaaagcacttagcacagtttctggcacacaataagagctcaatgaatattagcaattactataaacaggttcattcaccactccataaacaggtgattctgtcagtattaccatagtatgaaattcaggctgcttaggccacagacaagaagacaaatatctttaaatttctctgtagtcagactctccatgggatccctggccaaggtttgtgaggtggctgattggacaggatgaaggcaattgtcacgacaggggaccaaccagtggacccagatggtgacttcattagaacagtattccaaccagcaccacgcagtgtgtatcctgcagaggggccaaccaggcaataaaccgagttccaccaccttgcagccagcagccgagggaagctctgagctctgagagaactggtctattttcatcacatttggacaatggacacactccacagaaggcaaatgtcctttctcagaagacatatatcacatatgagtagctggcttgaaccttaactcagtgtgagagagtaataagaatatcaccatagcgtggcacaggtatgcacacacacacaggcacacacaggcatagcttattcttatttattacaagagctttcagtcaggctgaaatgtctaggcagtattttctaaactctttaagacgcatgtcccatggacacttccggtaaaatgattcagcttcaataagattcagacgcttactaacaaaactaatttgggtgttttttcagaaaagctcaaactgatacaaaactcacaatttcagcctccaattagcaatttcaaaaatattttgattctgatattttggcattgagaaaattggtagtcagttcaggacaaatgaaatagagtgtacttaaaaacagatgcatgatttaaatttgagagttggggaaagattctatcctgtaatatgaatgtaatataactgtcatctggtctccaattttactcttcccaacagaatgcaatctcatgaaatagttgcacctctgaagtgggtaagagttaattaacctgtctcttacttatctaacttaagtaagcgaaatggctgacatggaaaagtaaatgaattttccatttatacaccgatttttaaaaaccgatctttcactttcccaaaacaactctttaaagaaaatttaacataatcattttcagcttgaaaacttcaaatgaatgaatgtggcttgatttgggagaagatttaaagactgtgacaccagacaacctgggctcaaagtgctattctcaaatcacagttgccacctgaccagggcctgatagtcaacatttccaaaccctggttttgcaatctgtaaaactgaaattaaaaatacccatttgactgagaatgaacagaggcgtagtcctcagtctgtcattcaacaattgtgtgaccatgagcacattgtctaaccatgccttctttacgatggtcataataacaatattcacatctagtaataaatcataaattcaagctattgtttttatgatcattactattgtagctaataaacataacgagtgcgaatcaaatggtcactcaagtgtccacacactttagatgcccaatacatacgagtttccttttaccctcattcttttttagggaaataattacaaggaggatatctttcttcaaagcaaaccaagagattttcatttctatgaaggagattacacaatattcgaaggggtatgtgacaatctatgcagataattactctctctatgagtaattcttgtggcccaggggttcttaggatgcgggaagctggaatggtaatatatggtatcatcgtgtgacctgctcttgaacgcaagaggctatcgtttccagccagatcaaaacacaggcaaattctgatttaaaaaactgcacatattctacatgctcttatttcttgtatccagactaccccattaagctaatataaagggagaaaaagtgatagggtgcaaggaaaaattcaatcactgctaagctcatcaaactacacaatgagccatggtaatctgcagccttagagaagaagcccatcaatgacaacaccaccatcgatattttctactcacattctttcctatgcagtcccaattttcttacattaggaagcatttcatcaacattttaagttaacgaacctcacctcaaaaaatcacccagtctaaagtacacggcatgcaagagcaaacctaaactgtgttatcagaaaacaaaaccagatgatgtcgtgcctttttaaggaaatataaacctaaaataaaccgagaacacccctcccggggccatcacatacacaagaggcagagacttaggcaacactcagaagggaaaggaaggcaaacagcgaaaagtctctcagagaaaaagatttcatggactttggagccactacagctgtctctgcactctcctcttcaagcgtttctccacatctagtatcttcaaatcattagtgctttctagctacggtttcaatatttcccagaggtctctccagtccagcctttgcctgagagaacaggttacaaaaatatcccctctcccttttaccaggcaacaaagagaatttgcagtgctttgaaaacagaaatccacatccacaggaaaaacaggcctccgccagccgcagaaaagggtgcttcaggcacagggcaaccaggcgagagaaaatgcattcagagcggttagcacacaggattaatcacattataatttaatcatctgatcaaacactaattagcataattgcttgagggagaaatggctggaggaacccaggaacaccctgagcatccatgttcttaatgacaaaagagggaacacagatttggcttccctttcttcataagaaaagaaagaaaatagcaaataaagttaatcaatgacaagcatcaccagctatggttttagcagccaaaggaattgcaactgagattcatgacattttccttcctcctctctctccaggaccactctaaaatccatggaaaaaacgcagtactgatgttacggtaactagactctgagctatttaagtctgtgttctcaaccttggcacaatgaagatgttgaactggatcattctttgtcgtggggagctgtcctgtgcattacagggtgttgagcatcttatagtgagtgtcccctccagatgccagtagcaacccccaaccagatgtgtgacaaccaaaaatgtctccagacattgctcactgtcctctgtgggtgcaaaattgccctccgttaagaaccactgaagaacacagcttgtccggtgcatacttcttttaaaagtaaccaagtcataaaaataggggaggagtctttttatttccatttgccaaaaaataatgagcctaaaataatagttgcccagtttgggaggccgaggcgggcggatcacgaggtcaggagatcaagaccatcctggctaacatggtgaaaccccgtctctactaaaaatacaaaaattagccgggcatggtggcgggtgcctgtagtcccagctactcgccaggctgaggcaggagaacggcatgaacccgggaggctgagcttgcagtgagcagagatcacgccactgcactccagcctgggcgacagagtgagactctgtctccaaaataataataataataaaataataataataataataataataataataataataataatagttgcccagttccatggatttaccttatttctcatggctctatttagagctttacaataacccataatgcctatgcctgtgcacttcagaaaaaaataattaaataccagcctcctccatcaaagacctttagggagacacttccaggagcacctttgaatagggacactcacaggctcagagaactccaacccttgcttctagacttcagtgtgccctgagcaggcaagaggtcacagcaatgtcttccacctacccaggagagagcaaaccaccagtgactttgaaaatgaataaacccagagaaggcctccagaccccccaggaaaatacagctttctccctccactctcactgagcacatgtaagctctaatatttgctcccagtttctaaagagggagagagaaaggtgaacaagatggagagaggtgaaatgccgactgctcctccatttcttgcaaatgtatctccaccacaatcgactcattgcataaacttaacctgccttggccaccagtcaggctggacctaacaatattcactcttatcaagagatgctagagaccccagggaaaaatactcaacacttattgctgcaggaaagaaatattttctatgggttaaggtgatttgttctaataataatactgagtcacattatctctcatttttattttttttatgaagaaagtgtttcaccatttacaattactcatgagtctaacacaggttattaaatctgatgatggaaatatttatgccctttccgtggcagaaagatgggaaaagattgacctactctactacaaaatttaaaagagaacagtctgtgctataccatgtaggttgtgaaaactccaaatcagagaggaactgtgagctattttaaactgaaatcttcttctgcaattcccctgtcagagcttgtgacttcttaatataatgcccccacccccttttaaaggaacatgagtataggaaactattattgtaaagagacagtctaccctaattcctgtagtgatgagtaagcagaattcacatttattcagcctacaatggcttttataccatttccttctaaagctaaatttcaaaacggccactcaaaaaggtaatttctatagtgaatcacaataaaatcaccaaaggattataacatcaaacttgtttaagatgcctaggagggaaagttatttttaatattatctaaaataagatctcaggacacaaaaaggtatttttaaggttctgaatttaggcctctctccagcacacatttgagtctattttagtgccaaaatcaaggacacgatgttttgaaaaaattaatctgccaccaataactgccctctattttgtcatatatgtaacaaggtttaaaatgcacatatgcccttatatgccagcttctctcttttttctgacaacttaggataatgacatatactttgtatggtaaatacagtcaacttgtgattatttacctaaaagaaagccaagaacatccaacagagcaaatgacccaaagcccttcagatctggctctggaatgagcttgtgccctggacaaaggaatgtgcagcatcccaaggcggcatcaaagcaaaacctctagctgcaaacagatccactctcctgccctgtctcagcccgttctagctcatctcttaagcttgttcagtagagttacccaaatggtttcccactatggatctcttgcctggagcttcatggttacaggcaggtttcaaagggcttctctgctgggactccagctgctatcgaagaagggaccaatgtgagaaatacaatggaatcaagaccataagcaaagcacaagcatttataaacctgaatatcaaatacgctaacaggaagaaaaaatggtgcaaagagatagatattaatacacacagatgattcgtaagctgctagcatccacattgggagtgcctctggcaggatctacatacccctctactcagaatctttcttgttactaaaccccagcaccaattatcccgaaagatgcccaaattcttatggtggtcagtgaagacctaaccctgtatacagacattcccaataaattactacccaatacagagttctccaacagttcatcgagatgtacttggaactttactggatcaacttcctagctactgtttgggtagcttctttgcaagtgtgtgttttgcaaaggtgaattatggttcatgtggatcagaacaggcaaaggcatgcgttaataatgcaaattcacaggtcgtgcatacaccaaggctacagaatcagactctctggtatcagagctggaagacgacataacaaacatggaaaccataacttgggagaccccagtggtggtgggaaaaacaagacaaagtcacatgggattagaaacacctggggagctttccaaactacagcccattccccacaacgctggcatcagaatttccaacaggaggctaatgagaggaaatgcatttcaggaaacttccatatctcctttctctgttctccctgacccagaacaccggggtgttgagaaccagtgtcctcgatccttacctgggaaggcccacatagaaggatactaactaatgttcagcttgaagtgtcaacagactgtggtctacctcttatcctgatgtaagggtggaggggatgtgtggctatggggctggcacagcctcttcctccatattcagtgttcccatgaacatttgcctccgctgcctccaagcatctaatcccacagaagcctacagcatattctatattcttactctcccatcctcagcaatggggcggtagaggtatgggggagagtgtggggcccctcgtgcctgtgattaataaaggctgatgatgtgagatcccccaagacacaaataaaccaaccactgatgagagttccttgcccaaaacaaatacctagatcacctcgaggtccacatttttctacccagatttctatacaaatattcaatgaagcctattctaaaacagtagccaccaaggatttaatagctattgatttgggtgagtcataacagacacatctggtaattaaccatcctacccacattctgctgtcacgttaaggacccggatagaggttgctaacttgggctgccaacttaaacaacttgtgaaaggaggattctgtctgttagacagcattccacatttcttgtgcatttccttttcactagccaacgaaatagacaagtgactagcctttgcaggaactgacaagaactagatccggcaggagtgataaagtagtcatggttcccgttttgctggtagaggccattgttgtcattgttgggtgtcttcagctcattcctaaagtctcacaggtaatattccaaagcattgttatttctaccctgcaagctacatatcagttattaaaaatgctctacagccgagattaaaaaataaacatggcaattaagcagactgggacttggattttctgtatctctatggaacccaagatcaaatcacaccacagcggggctaactgtgaaaagaattgaatcttgagtttctctcgtgagaaagtatatttccttaaagtaataagtttccttattatataggaaatatagctgtcttttgtatttaaaaaaataaattaaattaaaatatacatagaattgcagcagttctaattatctttctacttgtctttctcttatgatacaatcacagaaatgttcccatcatccagcagttcatgcttatgagaagaatcaatgctttactcaatattaggaagattaatcaatggtaagagagtccactgcaatcacccacctgaagtggcatggatggctcttcagtatacggcatgggctacctcccaacagcccccctcagcccctgtgacccattcacgctggtcctaacaccagcttctacctgatcattgtggtgactccatgataatgctgaagccactttgggaccctcaggtcatcaaggtcaacactgggagtggtatcaccatactgctgttttgcagaagcatccaataatgagaaagttgggatatttagaaagaactataagctggcttttactgttttattttcagtgtgaaaaaagtgtaaattttatgtaaaaccagacttaaaactgtttcctgtttcttcattttaatactaaaagagtcaaggcttgtatgaatcaaaatcagtaattaaatagttcaaatttctttccatcaccttatcaaaatgccaatttcatagtctggagagactagcgacaaaatgatccattttatagatggttctttataagacaaaaggcaaacactttccacagcatcatcttctagggcaggtctgattttgtccagatttccaacctgtaaatcagcagtatttgcataaaaattcaacgattctactattaataaaacccaaagcccacttggaaccaggaaaaccagaatgctataagtaacaaatacaggcctagaaaggaaaactatttcatttctttttttatgctaaattgtatatacttaaggaacctgggggacattagctaagtgatatatgccagacacacacatacaaaatccatgatctcacttatatatggaatcttataaagactatttcatttataagagcatgtggcattctttttcccttgtccaataacatttgtgtcaatcacaaagcctggggtgatattgtctgcccgacacagactgacaaataaggacttcatatattgcaatttaaaaccccagagtttgagaacaggttaacatggagggacttgtgataatcacaggatcctaaatttgaactcttctctcagtaattgctttattactgagatgtatgcagatttcaccctcctactattctgccgtgaaacatctttaagaaaggcaaggcttattgcagaataaatatttgtagcagtgctgcaagttcaatgtcctcccttcacctccagtcttttgttcagacctactcaagctgtttccagataatatatatattgccttctcatccccagcttcccaagcctaacatagacttaaagactgagagcacttctagaatattctgcagagagtccaaagagatttcataatatttctgcaagggttggtatgcttttttttttgtttttttctcctacaaaatgctgtacagagctgggacgttaggggaagctagcatttagtatggaggtgatctcttgcattttcaattctttctttcactgtctttgcggctgcacttaaaaacagctttctataaataggactgcttgctcactcttaaatcttactcactgtcttctcagtaaaaaaaataactagggatacaggcaagattcattaatccctgtcattctaactctctgtgtagtagcctctttccttcttcatatcttgacatatatcttctcaatcccattcatccctctctgttaaaccataatatgtatttacataatccagggggcttcaagatcaaaaattaatccagttgcatgatttttaaaaaatcagcgttgatcacatagaacaaatagagatgtccaaaaatcaaaagctgataaatattgtaagctataagacacttaatttgatttttatatttggacaaaaatcaactttaacaatgattaagatatcctttcatgttactttgatgaagatagcaactgtcatatttgaatctgcaaaataagaaataaagataatgacaaaaaacccataaatccataggatgctgaagaaaacagtagtatgactttttaaagatgaattaaggcctgagaaagtaagctttgttttgatgtcctgggtggctctttgatgaagaaatgaattcccaagagctgggggtggcggagtgggcggggaacctaaatgtcggtttgatgtttctggctggctttcaaaatgcgacagggcaataaacactgtataggaattttaaatcatgccatttagcagcgtacacttgagaacaaggggtccagcacatggatgaaattattgtctgtgacacttgacccactgcacggcaggaagagcacctaaagcaattacatagctgttgtgcaacagtgatgaagtcccatcagatactcgaaatatgaatctctttttgaaaagagaagaaaatgccccaagccacaggcgtttctggaaaataaacatttctaccgtgattgagtcactacgacagaaaaaggtgggtagagcaaaagagtccagtggtttagtcagaatgcaagatagggaccaggagagcaagtccaggaaagcaaactaagagggggagccaatcagctagaggcagaagagagaggtggacgggagggaggaaggtggacaggagttaaggaggggagaaaggctctgcctatcactttttcctttcactccgtaaggaacatcatctatttccactactccataccatgtgctctgctctgtgctaaggacacgctcaggcttcgcacgcatttcagactatggaggctcctgtctagctagtgagagaggcagtcactagccaaatcagcatcacctaaatgcaggcgtaacgattaccacagactccatcaaggaaacagccaagatttttagaaaaaggataatatggagggaactgattttcaggagcagatttgtgaaacccaacccttctgaacgtcctggtcagaagctgtctgacctctgaaccaaaatcctgtccctgcttccctcctgccaccttgacagaccttgcgtcacctgcagaaaacatccgtgtgctccaccctttgaattcagaacgacatagtggatactccgtggggctgctggaatcttccattcccactgccttatcttaacccatagattcggcaagggaaatgcaactttgaattttctggcattttcacaacattgaagaaaagaacataaatatagttggggggaggggcgcggagagataagatgagcatttttgtgcccaggtctttggaacttgaagagttaaccccccagtccaggggaacaggtgttttccagtgggcctgggggagagggaagggggctcccggtcccggagccttgcctgcggagattgatggactgcggaggagcgggcacgtcagcatcacccctgtcaccatcagcaggagaagcggcggctcctggaatgacattggaaggtcagccaatcaggcgcggagctgctcccggagctgccacctccgaggcgcgcgccacgccggggttccctcgcggctttggaaagggggtgcaaatgcacccttctgcgggcccgctacccgctgcaacacctgtgtttcctttctgggcaccttctaggtttctagatattgctgtgaatacggtcctccgctgtacagttgaaaacaaaggctgctggacctcgcctgacctgcggttgcctttgcccggttcctgttagacgaactctacgacgccggagtttgggcgcagtgaacttgagagatcgtgggggaggcgtcttcagaagaaagcccctgaccatctgcatggagcagtcctccctcggtggcggctgggtttgctggctctgctgaaggctggctgcaagagtcttgtgaggtttgccgcccactagtgtcctatggcggggacacaatcggcctgcaggtagcaccacctccctatctcccaggctgagggtgcgggcaccaaggcccagcgtgcacttcagcgcagcagccaagaaaatgcccacacgcgcttgtttgtgtgggcacacccctgggtgcctgccctgctctggagaggtgggccacgcatggaaaccgaggaaatcgaagtgctcatttccgaaatactattgaatgcactgcctaatgcaaaatacattctttttcactacctattaattatttatgagccacattcataatcttacccgtagaattcagctaattttacgaaacctggatgccacattttgtaaatgcatccacttgataaacccatccttttattttgcaaacataaatttccaatctacagtgttcacaggtctttctttataaaatgacctctctctctccctctctcaatcaagttttaatacgcattgaattgagtctcttgtcgaaatactccgtgcaccttactccagacacatctaacataaaataccttgccagctacccggaggtccaggaattggggattagaattggcaaatattttagtcaaaattagttcccctaccagaatgctgtattgcgctggttctgccccccgtgactcactgatcccccgaggcagcaaaccgtggtcacaccaaaatgacaaaggagagagtcaaaaagtggagaacgatccactggcatttattgaaggtctgcgtggcattttgttttcctacagagggcatcttggaggggcatgcagcttaagttaaaaggcctcggaatttaggtgaaccctgagattatggatagctttttaatctgtttaataaagatgggggagaaagggaagtggaggcagccctgaaattgttcacctgataacatttcttccttacatacatttatgtgaattaaataaaaatcacctttgaagtccttaaggtgcatttgtatttacaaaggtctgcttctaattaaataaaatagcaagcgtgtgctctgtaatttcctatcaagtgaatggatgaagctcaaaggtgctgcatactcatcttctctttaatgagcaccttcttactcccagcaccccaccgtctctaatctccatgaccctcaggccccatgaaagcggatgcagtagaactgaaaatcccacagctcaggaaaagatgatgtcaggaatgcatgcatgtgtgtgtgtgtgtgtgtgtgtgtgtgtgtgtgtgtgtgtaaaaacagagatgccaggatactagcaaaactatattacatataataaatctaattcttcatcattctgtttgtctgaaggcctggctcttcttttagcaataattttaaactagaatgtgctctggggttaaaaccaggagaaatggtaatgaaacacaatgcagtaggaagctttgctgagaagacaccgagggacgtgtgtgggtgagtgtctgcacatacgtgtaccttggctccttgcactgtaacagaagctcgcgtgtatttccagaacattgcagaacaaattgactgctttaaaacacgatactgcacctcatcaggtgaggtcattcatttaagggtttaacctatgaagggcctggtcactgacttcttctttttttttttttttttttcaaaaatactgcctgcagcctgtctagcaaccatacttttattaagaaataactgtacttctgatacatcaataagaaaaatattgttgtctactgttaaaatgcagatgtattgtgggcttattttaatagccccaaatattaaactacataatcttttacaaatgaaaaaaaaaagttatcatgtcaggcattttgatgcttgaggcctagcaataatcagtttaggtattagaattcatcaatcttttatcacacacattcagaaatttttcaaagttgaggtataacaaaatatgacagttgttgacaaaaatattctcaattttttaaagtttaattcagataggtagaaaccatttactcttatatttttgaaatatggtcttacaaacaggcatagttccaaactggattcttattttatttcaacatgtctatatattttatgatcctttccccagtatgtaatgaacaccataccttagaaaactgtttaaagctgatttcccctccccccttcaaagatcctaaagctttacagcaggcttttaatgttttcatccttgatcatataaagagaggggcatttttatacaagacagttccatagccttctgctagattggatcagaatacgtaatacagcaatgtaaaatattcatttgtgtttgctgtttatgtctaatattgtggaatctacctatatttattacaataatggtgattatcagttgattttaaaagtcttgaaaataatacttgcagaactcactatatgagtacctacataatttttgcatatatttttcatattgcagaatatttgaggtttcatataattgtattaccatatataattatttctatgattgtttattttagttataaaatgctgattcagaaaaaaagtcacacacacatatagcatctctgtatcagaggctaatagtctgtatcagtatcataaattcttccataccattttgtcatacaaaatgctaaaactgtaaataaatactggctgactgacaaccagcacagcctctttcatcatcctgaaacacacacttcccaatggggtgcaaattttgtttcttcttataacccaggcctttccaaggagttcagaaaggtactccctgacaggcgaaacagggtgtcaaggctctgtgtctttggaacacatgtgtaggcatctctacatttcttaggaggtcgcattagcagaagagcagaaagggctgacttccccgacacatctccgcatgttccctaagcacatctgtccctgaagggaaattcccaggaggacacaggacaggtatggtgccctctgggaaagatgggtgtcttgtcagaacttgttgcaattctttcctgctaggaaatctcaaaatgaaagtttcaaacactttgctttaggttatactggagagcaaagtatcattttcatgttcattttgatagtaccttctttcaactctaccttttcttagtcaccgtttttttaaaaaattgacaatgctcatgcatttcttctggcctgttggtatgctgattctttaggcactgtctaggtaggcaaagaaaatgcactgccttgcagccaacacacagagcttccctgtgtgtcttccaggaaaatcttagagcctcccctttgcttctcgtattttctcacaagggccagatttcctctcttctcttcttttaccttctcttcttctcctctctctctctctctctctctctctctctgtctctgtgtctgtctcgctctctctccctcctctctttctctctctctctctcctctcttctggctaggggattctgcttaatggtttaatttcaactgtcagtaggttatacattttatgcagatgtgtgttccaaaatttgaaatgggaatttaagccgtagctactcccaggcgatgtcaaatgatgacaatttcctctggttcccacaagagaggaagccattcatacatgtaagttcatatttatgcggtgacaggcagcctaaggtgcagtcacacttactaattgggtctgactcagtcaagagcaatagctttctaaatacccaggaagaaatcatttcaaaatataatattggctgggcatgaggaaatgtatgctatttacaatattcactgatttcatttttacaactatacaggtgtttttttttttttaatttgtcaacatttcagatgatgtaatgcttatcagtgcatatttttacataaacgactgtgaggagcatgaagcagcacggggtgcatagaaggacagaacattcttaaagccctccttggtgctggagatacattgtactagcatgaaattacgtgtttgaaaaatctcaaaaagcattgaatctgaagggagatgttcctcattgacccctccacttgcgtgcacttggaatgtcacatccctttccaggttgtaatattcaaagtggcaatcttcctgtctctccttctgtcaccaaacctggtttattctgaatgaggcagctctctagtactggagttaggctctgagctgtcacttggctaggtaagcgccttccaatgattacagagcaatttctcccgggcctctccattgccacctcttctcccccaaaaaataaatatgatatttaaaaaataaataaaagcacgaaattttaaacacagatgaagcggaaaaagaaagaagactttacccatgcatccaatgccaccccccacccccccgcccccccggtcaatgataaggaaacgaaattcatcacaaaccgaaaggctcaccattcgcgaagctctggaacaaggagagagccagtatccacatgcccctgccgctccccggcctcccgcgagcgacgcgccggcctcgccccccgcgctccgcccggcccggctccgctcgccgctcggcacctgcccgggggccgccgcccgcccgccgcccgccgccgccgccgccgctgcctagccgcccgggcacgcggcgcggccgggctccggagcgagggctgcgctcgccgcgcgctgcgctcctgcacacctgctcccgggcgccgcgccccacgctgcggccggagcccaggtgcgccgtcagctcagtgggcccccggcaggtcggcaggtggagagagccgcagacgcgggcgtgagctcatcccgggcactcggcgcccagaatgcgcagccagcggcctcccgtgcgccagccctcaccctccgcatccaggcagcaggcgggcgggcaggctcatctttgccgtgctccggcctcagtcacatggatccctctgccaaccttccctgcctgcgagccgggcgagtgaagccgagcgcggaggcgagcagggacccctcccctgcctctggccgctggggcgctctgcagtcttaaagcagcagcagagacgtgcagccgaactgaggcaggaccggggagagcgcagccaccgcacagtcacgcacagtcatcaggaggaatttcttagaggcttaaataatcatttcaacagctgcttatttttagttattttcctgccggttgctaataagggatggccggggtgactattgcggaaggtggccagccacggagaggtgaacatgaaatgctcgtagttttaataaaatgtgcagctggattccgattccgtatttactctcagaaaagtccagttcatttgcttagagggaaatgctccttccaaatccttgctgctactgtaaagatctctatgatttcacgggctaatttttaattatcttgaatacatggtagaatgcaaacacaagcacttctaattttgctctctgaatggcgcataaaaaagctgattgaaattgctgataatttgagtaatcccaaacatatagcccctttcacgtttctgtgaaaagtcaatatgttaacatttcctgaatgttctgtatgattcttgaagtcatgataatatttaaattaaagctctcacaagggcgtacatctatccatcactttgcaatataatgaccgacagggctggaatgcaccccagtgtagaagccaggatggaatgctcacagtcaggacaatcaggactgaaaaaaagcattcggtgggggtcaagggagacattttcaagggaaattgagtaggctttttcctaggcactaggtatcctaactgggctccatgtccccctccaaatacagaagaatgatgcacatctcagacagctcacaaaacacaggagaagcaaatggtgaggcagaaacaaaatggtgctttaccagggttgggcacaagatggccaggccctgtgtaccaggaagggtcagctgagccggtgatgctgcctggctcaccacggctctgcagctgcaggtgatcacgtgctgccgcccactcaggctgcgcaggcccagcccccagtaccacgcaccagaaccagcatcctctggctttgcaaatgctgggtgctcagtccctggtccttcccaaatgcaacccaggaaggcaggggatgggcctgattctgtccctgcatctggctggttgacctattcattaattcttacttgcacactagccacctgcaagggtgcccaggcactggggtcagggaaacccagggtcgaattgcagctcctccactaccccgatgtggggcttctgcatgtgactcgagcctcaatttcctcatatgcagactggaaattatcacagttcttaactcacagaggtgtgaagatctttccatccgttgacagcacatggtcactgtagttagcgatggctgtggttaactgttactgagtttgggagcagggctggaaacatgatttgtggggtccactataaaatgaaaatggagagctcctttctcaaaatgaaaaagaagcaccataacaagtgctaaaacagaacacttcctcctttcttcctgcctctctcaaccagtcatggtgttttctgctacatgctgctcttccttgggcgtgggaatgcacccctgtacagaccccacagaccttccaggtgactcagtgcagtacaagaggcttccacttgccagttgcttccctgcccttggctgcacccacatgctgtggccagccacagttagggggtggggaagccactgtctctctcccacagcccactgtcccaatgtacagtggacaggagatccctcagggattgcaacctccatgctgggaagctctgggtatctggattggaggtgggcacaagcctctggccacttgtggaatgtgccctggcactgccagcctgctgaggggatggtcactgcgaggcctttctctgaactcctgcacagtgcttgtcctgcacacatgcccatacactcaccagagatggcaggtggtggcagaacacaggcttgctgttccaaaatgatgcagttgccaccctgttgggaagcagcaacaattgcaggggcagaggctgctcaagagctgggggaacatggggttgggaagtggacagccaagaacctctcccaaaggagaggtggcaggtggcaggtagcaggatggtacagaagccaaggctccaagccctcttcatgctccattgtcccattggatttagaaaaggtaaaacagaggtgatatcattaaacatttcaagatggtgactacagagaattcaaccccaagtgcaggcccttctttgcctgggaccagatgggaccccgtgtgagtgcacctctccgtggttgtctattaatgcatctgccacagggtgaatgggtgaaggaccttgaatgggcctaacacatgcaccagtgtcttttcaaatgtatttacgtaatagacttcagtaagaaacatacttatttctcactaaactgtgagttccatgagaccagacactctttcctgttcaggaaggtatcctcatggcctggcccaagtacatgctcggtaagtatttgtgggctggaatggagatctctaatgcaggtagaaggcggagcctgtcctcagatatgcacacatgtgtacacataaagcgccatggtaatttaggagggaaagtgagtactgtacttcatatagaagtctcagaggaaatggcaagaacgttgagctttcaaattcagttaagatgtcaacatgcaaaactgagtcaaggacaggggattctgccctgagagtataaacatctggaaaagttaactttataaaataccttaggtttccagtgattcctccttttgtattcctaatcagtgtagcctctggaagatcaacctttgacctgaaacaattccatccagacttttcccttccccagttctgtcttcctgcagctctgggtcagccatcctaggggaagaaaggtaaagtcaaagaggccaccttggtgctcacttgactgatgctaaataaggaacaatgcacatttgaggagttacatcatccaggttacatcatccaagtatagcatctgttactcctctgttttctgttggagaaccaggaagagcatatatgaagcaatggcctttgagccttgtgctaaaggaagggttgggggttgaatgttgccagggatgagcaaggagggcattttaggcagtaaggtctccaccgtgggaagcctcagtcctgctggacctgtggggttcattctgatcaaggcaataaggagtttcccatgggggacctgcattagttgcctagggctgctgaaacaaacgtccccaaactgggtgacttaaaacaacaggaacctattgtcttagaatttggaatgctaaaagtccaaaaccaaggtgttggtaggaacctcctcttctgcaacctgcaggagagcttccccttttctcatccagcctctagtggttgctgccatccttggcactctttgacttgcagctgcatctttctgatctcaccttctgtcttcacatggctttctttatccctgcaagtgtctgggcgtctctactcttcttacaagaatggtggttatgttagaatagagactcaccctactccagtatgatctcatttcaacttattacatttgcaacctttgatgtccctactttcaaatagggtcccactctgaggcactgtgggttaggattgcaccctatcttttggagagaagggaatacagttaaaccccaacaggatcaagatgcctgaagtcaaatggcaaggggcagagaagggtttctgtagatttgggtgaggacaccagcatcttgctttataactctcttgagccgtgtgcatcagggaccatcatggtgcttccctgtgcagagaaggagctcagactttacttggagtctcagtttcttctcgtggaaaattgagtaatcatacccacccttccgatcttagaagattgttgagaggattcaatgagatatgggagttggctctgagaaggttacacagataaccactacatgatgtcataacagcctacaactgaacctatagaaacattttgaggaaacacattacttggcaaagcctcactctggctatagggtgttttgattcattgaaaccagacactgccacacctctggtctcagaactgcaaacggcagagatgatcaagaatgtcagcagcgacccacccatttcttcctccaatgaactgattgagtccttcaacaaatatttggcataagtctgttatctacaagttgttatagtagtccctgtgggggctaaagatggatgaggatgaaccgggttgggcaccggggagcctctgggctgcttgaaatgttctccgtctgggtgtgggtaaacaccacacaggaaaatacacatggaaaatttgccacgctgtacacttaagccttatgtactttacatgccttactgtgtggaaaaaaagaaaaaaaaaaagaccaaaacacagtatctactaacctcaatcaagtgggaaattcaaataatagtgacaacaatttgataagataaattatataatcgggagttgacacatctaattcaactagctggtgtggtgtgtgtgtgcctgtgtgtgtgctgtacatgtgtgtctttctgagtttggtgtgtgtttgtgtgtgtggtatctgtgtttgtgactgtgtgtgtttctctgtgaaagtgtgtttgtgtttatgtgtttctgtggtgtgtgtttgtattttagtgtgtgtgtgtattttgtgtgtttgcatatgtggtgtgtgtttatgtgcattgttttgggtgggtgggtatgtgtgtgtgtggtggaagcaggtgtggcagagacagtgggcagggaaggcttccctgcagataccggagctgagtcctgaacactctgttagcttcagccttgtacacgaaggaacagttgccccacggcagagagagctgaatgtacagagacagactggcaggacacagcacagtcatggaaggccccttgcaaggaggagttggggtccatcctgaaggcgaaaggaaaccactgatgtatggtcaatagggaagtgacacaatgaggggtatgccttggaaacattcccttctggggacacactggataatggcctgaggaatgtgagaaggatgcagggagaactttctaggaaatgaggaagacctgaccagtgcagtaggactgggatgaagccacttgccgcagataatagtgaaagacatttaaaaggtgagatgatcaggagttggaaatactttaatagtactttaaataacagttgcatcattctcagtacatgaggcctttagctcgtcactgacactcattcaacatctgtatgttcagttttaggcaacgtgctgtctgtgctcacaaaatcaattcttttctgggaggtgagcactgcttctctcctccctgccctccagatgcggaagccttggctcagagcggtccagaaccctgcactatattacccagccagttgggggcagagcttggtctgaacccaagcacaacacccagaggtccagtaatgatcagtccccttctgaagagggaagagttggggcatgtggggagggacggggaggatggcaagatgactcctacagatccatggtggatgcttgtgtggacagaggagcctctgaccaagaacaggaaccccatcatctcccatgggcttttacatttctccccacttctactctctcacacacagcctggtctctgtaaagcagccaccttgatcctgcaatgcacgcacacacacacacacacacacacacacacacacacaatatcattggaagccctgatcaaactctccattgcctccctgtatcatgcaaggtgaaatccgaagtcctcaccatggccatgagccctgtgttctccagcaccagctcctgtagggtagatcccctgcccctgccaccttcctgctcacacacccagcgctggcttcctgcattttgtgcaggcacactcagcacaagcgcacactcttccctcaggcaccccaggggccaccctcccactgccatcactggttatgcagacaccttcttttcggagagcctttccctgacaaacccccacaccaatagcattctccaccctaccagtgtgtatccgctgagctttattttcactatattgatttataaatgtatgtaattatttacgggcttatcttcttagatgaaagctgagattttgtctttctgttcacttctgcactcaccacacctagaataatgcttagcgtatagtaaatgctcaatgaatatctgctgaattatgaaagagactagatcaaaaaaaaaaaaaaagtgttgcatgaggcaaggcacagagacccttagtgacatctcctgcatttcacaccttgggagacatagaattgtgatagaaaaaaaaaaaaaacccagatggaagggaatttaaaaaaaaaacacttcttagatgtcaaatcagcttatcaacttgcatacacatttcatcaaaataaatatttctttactccgcactgggcaggtggcttgctcataggcactctaacaagttatttttttaaatgaagacaggtactgagtctagggatttgaattataagagaaggtcaaggcggggtttgtatcaaataggttttagaagcagagaagacttcaaaccgaaacataagcctgtgtggagagcgctgatcatgacagcccattgggattcagttgaggggaaggacgacgctgagggaagaggctggggggagagctgcagatgggggtgcgggcctggatctgcctgagggacccgagcccccaccagccccgggactctcgtggaggggtgcagcggccccctcttgaaagaacggtgttcatacagagttcctggaggcgccaggcgtgccaggcagctgtccctggggcctccttacaggaggggcctccagatgagatgagcggagaaatcctggttttagcacggggctttcaatgtctggggaatgatccagcgtggccccaagggcagcagaatgaggaagcagctcagggatccttgtatgaccccgtagccccagccacagctcagctctgtggcttcgtgggcagcttttcagacaccagggaagacagtcttgatgaaacgccccagggtctctaaaggagctccgtcctcactggggaggtgctaaacagagaggggcaggggtcccaaaacactacgtggagaaaggcgaggggccagccttgtgttccctgcaggagtgatgtggttctggagcccagtggttaagacctgggttggggtcagactccgtcagggctgctgagcctgagccagagcgaggtgacccgtgcacgtggctttacctctggcctctaaagactggtctgttaaccctacctatgccacagagctgctatgacaatcacatgacttaaaacctgccaagcgcctagagcagggcccagcacgcagagcaaaagatcccataaatgtaagtatttactattgttattgatgctacagctttgctgtgtttagtgaggttctatgccttgacgcaagagcagaagaaagggaacagtgtcaaacacagatcaagaatgaggaaaagacgggaaggaaggcgatgtagaaagcagaagttggaaagaaataaacaagaaaactatacagacatttccttttcatttacataaaccaaattttagtggcttgagagaagtctaagaaattggggatgagataaaattggacgcttacttcatttcagacacgttaaaaatgctaattaaaaaaaactatacaagaaaaatacttgagtcataagcaaaatgtaagaccaagcaattcagatagaagaatattctggagacagcatgttcatgtataacacagtggccagggatacatctttttttttttttttttgagatggagtcttgctgtgccacccaggctggagtgtagtggcaccatctcggctcactgcaacctccacctcctgggttcaagcgattctcctgcctcagcctcctgagtagctgggactacaggcgagcaccaccatgcccggctaatttttttatattttagtagagacggggtttcaccatgttggccaggatggtctcgatctcctgacctcgtgatctgcccgcctcagcctcccagcgtgctgggattacaggtgtgagccactgcacctggccaggatacatctttaaacatgacataagcccagaagctataaaataaaagacaaataactgcaatattcttttaatggcaaacttctgaccaaaacaaagccagaagacaagtaatgggtggactaaggggcacactcaccacctgcaagatagaggactaatatcaatataaggttgaacatttaacaattgataacaaaaagcaattaataggcctaggacttgaatatgatagtttagaggaaaagaaaacaaaacagccaataaacctgagcagaagctgaaccacattaataggcagggaaatgtacatttaaataacaattgcatatttcttctcatcctccacatggaaaagaactaaatgacaaggaaactaatgttggtgggacacagggggaaaggatacttgtggacattgttggtggcaatttgatacttttgtagctgtttttaattttaatggattctggcaatatctatttacaaacaaaacaaaaatcacctacacttcaactttgcagtcttagtcttaggcatctgttccattgagataaaacatcagcagaacctaaagctgtatgggcagtgctatctgctgccgaatagtttgctgaaacaagagaaagaggagagacagagaagaagaaaaggaaaggaaaggaagaagggaggaagccatccaaatgcctatcctcgagggatgttgaattaaatatagtcataaaaaatcagggatgtgtagacatttccaccacatttaattaagcgaaaaaagcaagatacagaagaacacatgaaatatctcactttcgtaaaatacacgtgtgtgtgtgtatgtgtgtgtgtgtgtgtgtgtgagagagagagagagagagactgaaatcttgtaagggtgaaaaaatgttgcacagcaaatgttaatatttgttacctgattgggttgaggtggagagaggaggagaaagggaaaaaaacaaaaacaaaaccaaaaaacaaaaaaaagaaaggggtttagaaaatcaacacatataacataacctcacttatgtaaaatataactgttaaaatggcaatggtagctatctaagtagtgggaagccagttttctctttgtctattatacttttctgggttgtttgattctttttattttcttaaaaaatctaaaattatgttaaaaggcaataaagaaacaaaattaagtaaattatgaaacctgacaagatttgtgtagcacaatacagcgaacagcttgtcaggtacacagtggaactaagttaaaagtcaaaattctcttgtctccttttcttctgatctttcaggtcctgcctagttgaaacctagcagcacctttagtgaggggtgtgaacccactttccatcacagttgtgggtccacaggcccattcttcccatatcacttgtcacttctccctcatgtcatccatatcctcctgagagttcataagcagccttgaaggtgtgtttcattctgcagcccccactatagtggacatgtgttggataagaggccattttgaccttttctcattgttaaaatctctaaacaaagtaacatgcttatattagccagggttcttaagagaaaacagagcaaattggatacatatattatattatagactacatatagacatatagactatatgtatacatacacacacacacacacacacacacacacccctatacatatatgtgtgtggagagagagagcaatttactgtacggtactggttcacatggcgatggaggctgagaagtcccataccttgccatcggccagctggagacctgggaaagtcagtggtgtagttcaaaggcctgagagctgcagagccagtggtatatattccagtctggatctgaaggcctgataaccagaaactcttggggcagaaaacatgccccagctcaagggatcaggtagagaataaattcaaccttccttcttctttttgttctactcaggctctcaacagattggatgaggcccacccacaatggagagggccatctacttcactcagtccaccaatgcgaatgtaagtctcttgcagaaacaccctcacagacacatccagaaataatatttcaccagctatctgggcaccccatggcccagtcaagttgacaaatacaattaaccatcacagtaccccatcaggttcacttcctcattctcctccagaaggccgggccatggggtagggagaagtcagaaacaaaactccatggaaacagcagttgagagtaaaggaagtgacacgggagatggaacctgttttctgcacttacacagagcaagtccttgcagaagtgaacgttttttgggaatgggagggatggtaagtggtttacagaaaaaagggcatagcatatttatggagatctgtggttggagagtaaggaaagggccagattcaagtccacttgactgccttgctcatggtttctatcctttgccttgcagaggcatggcatgtgccagggtggctgagggcagtgccctctcagctgaggaaggcccactgagagcaactagaagcagcacccgcagtccagaccatagctaatgccatctgtttgccaatgcctatatgatttcatcacatcttaagaaaagttttgaaaagcaactctcaatatttctaaggtattttaactttttcatgactatttctctaggaatagtaatggatattcctccaaggatggctgaggagcaactgaaaactaaataacatgtgactgtgagagatattaatggcctttgttatttaagacaaatttaatctcttcggtctttggcagatcctttccaaagcaagtgaaagactcagaatgtgatccacaaccaggacatctacctattcattgaacaaagatttattcagcccctgctactggctagcactgtgaacacacagtatatatcagtggacaaaacagacagcaactgtttctcacatggtgcttacagtcaatattatgctcactgtatgaaaattatactcactcttgtttgtttctgagagcatttcaaggacaaaaacttattaaatcctaaatgacttgcatcctggtgttgtctctgagatttctcttctcatgcaatttactatcattgaaaataccagccacacatgcatatgcaaaaatataactggatgaatggtcagttctgtgattacaccatagcaactggatgggaaaaacccaaatatccaccatcagggaacaattaaataataattcatctagattatggaatattatgcagctattaaaatgactaggcagctttagggctcatataacagatctccagatgttttgaagctggaagagtaatgaaataaaattagtggatactgtatgttcccactcccataaagaaatgtgtattcatttctctgtttatacatgcatagaaagctcttggagagatctataacaagctgttatccatagttgcatctcaaaaaacagactggggtaggacagagaagggatatataatttcatgaaatagccttctttattaaatagatgtgttcttactaattttgttttattttactatgcacaagtctactttttaattataaaaagataccaatgaactttaaggggttattatatatggtttctacaactgtcaaatacgtcagttgctagctatgtgactatttcaatttaaaggtaaattaattaaaataaactttaaaaaaaatgagatcctcagttgcactcaccatatttcaagtgctcagtagccacaatggtgagtggctggcatattaaacagtgctgacatatagaacatttccattattgcagacagttatattggacagtgctggatactctatgaacctacagccagtgaatttttcatgagatatctaagcctttgttcttcactctacagttgactcaaaaggaaattacccagtagagctgtgtggtaaagaataagaaggaagtttcctcaaaattaacacatatctccctttctatctccactcgttaaccagcaggaaagttggaaattcattccttcaacctttttacagtgtcgtgatcaagacttttaagttattttgcatatattttaagtgttacaaggtctgggtacctttccccggcagcaacccaggttgatcactatttattgagtgttatttattaacataaaataataaaaaaaaaccaaaccaactctaatctgattttttaattactgtataagtgctggtaattcctcacttttttagattcctcacattcaaatgtgtttagccttctgaggtcccgtccaactctgagaagccacaaacgtaaccccaactgagacttgagtttggataactgtggatgcctaaaagttgttatcagtatatttggctcaataagctaaaaagtaccactgaattatttggggattgcccattcatttctactctgaaagttttacttgtgtttcttaatgagtctaatatgaatttaaatctccagccaccaaaactagagtcttagtcagtcaaatgccaacaaagtaaacttttagacttagaagccgtcttcttccaattaggaaaagaaaaatgcagaattacatcttatccttgcacttcagagtgaaagtaactgatttaaaaattctctccttttcacaccaagctaatagaatattggaccgtcatctggctggagagctgccctcctgagatgtctgtgtggaggacacatgcatttcatctgttaataatagtatcttcaacaaagagccctgcaccaagccatctgttaggttgggggttttcataatcaactagtagaggaggaagtgtgggcgaatacaaaacgctctttcactccagttctcttttccctgtttggactcccttgaagaaactgcaacaatccattttagaggagagaccttagaacctgcagagaaagcacaaactgcatatttccctgcaaacagatattcagaatgaccttcttgctaccaggagaggaatgtaaatctcccagtgctacaagctctcctttttcttattcgcagacttttatgagaatcagcttataatagcaacctgatctgaactcaccatgcaggaaagtgaggcaaagatggggtctggaccagcccacaaaaaacgtcctgtcttaggccagacattttaccaagagagcctcaaagcaggccagaaaagggaagatgaggtaaaagagcacatttctgctattcactgttaatcagatgggaaaacccagcaaatacaactcagtaaagcatctgcttctcttcagaaggtgcaaaggagtaaaacaccatagaatcacttctagttttctttttatctaccagtgtggtctgaataaaaattaaataacttttgaaaagttcacatttgtcatccattacccaattcattcttgtgggtaatttttaagtaaacacacgattaacatggtgttggtaggtcattaacactggtagtgtcattaacatggcactggtaggcaatgccatcataaatgaattttcacaaaaaaatttctcttttatgggaaaaaaaggaacttgctcaaaaaacatttatattaccaactttcaagttggacagatgaagatttgaatttgtccctcctattactagtaatgtgtccttgaacaactcactggctctctctagtcctcagcttcctcacctgaaaaataggaatatcaacaaaacataacctataaggttcttgtaaggtttaaatcaaatatcatctctgctcagagctgtgcctggtacatcagaagagctcaatgtggcactgttagtgatttatcattttccaccttgttaaggaatgcacacagagcataactaaagttttcttatttacttaagcccatcattgtgaacattacagtgtaggtcagaggcccatctgtccctatacttagtgttcccattgatttggcggaactcaattgtttggtgtttgggagcagtttctggtacccagcccccatattcacttctggtttttaatcagctatgaactaggaatacaagtgaccaaataaattactactgtacttaagataggtgtaaatgggctcaaattcagtgattcccatattagaattacctagagagcttgagctgctgtgaagacaaggcgtctgcattttataagccccgggtgagtccaatgtcctggtggaggccacggctgtaagtgaagaccagttccctcattccctgacagcagcccaggaagggcagtaagtggccagccacagtaagtacagctgggggcagacctggagcttcctttccagtaggagggccaaggtcacagactactttatacgtctaaatctaatgcgaccctcaaggagagggagacggaagaaatcaaagaaaattaaatccttcgaccagagctaaccaagatcgctatgtgccaaatcttgtgctaagtggttggggtatgttggtaaataagacagaaatgaccccaacccctgcatgcacagaggactgacaagaagactaatgggggcaaataaaaccaagaattgcacaagtagtgaaacatttgaataattaaagaaattgcaattaaataatggtactatggaaagtacttgggtgaaaaagtgtaaggtgtggggagatacggcaaagaggtcctaaccaaggatgagtgatcagacagcatcatgaggaggaccagcgggtggtgtcttactttcctgggactgctgtaacaaagcgccacatgctagggtaacttcaaaacagaaatgcattttctcacgattctggaggtcagaagttcaagatcaagtgtcagcactgttggttccttctgaggctctgagagagggatcatttcctggcctaccctcagcgtctagtgatttgctagcagtcttgggtgttcctcggcttctgctgcatgttctcatggcgttctctgccttggggttcacacagcattctcccagtgcacctgtccgtgtccaggcttctcctttttataaggacgtcaggcatattggattagaaaccactataatgagtgcatcttaacttgatcatctctaataaggtcatattcacaggtactgggggttagaacttcaacatcttttagagaaacacatttcagccattaacaggtagtaaagaattagactgggtgaaggaggatggaagaagaaagcattgctagagaagaaagcacatgccaaggccctcagcaaggagggctgctgcagtgaccaggaatggctgggagcctggtctgctggagtgtgggaagcaagaggagggtcaggaggcacaggcagcagctgatcctgcagagctctgggggctctgtgtggaatgtgggagccaacatgggagattatgaaaccaagacaactgaaggcaagatgtagcagaaccagcaagagggacaaaagggaactgccactctgtcatctgactgaagacccagggtctgattctagagagagataaacagtctctggattgaatgacaccagacacagttgaaaatggaattcaaattgaaaacaggatgttaaagaaatgttcatatactgaagggtgagattccccaccttctttctctagtaggctcttaggagtctggcagccagagatgacactgtgatacctggtcagtccaaaagagacactaagatactgccatgcagatccccccattgaagccaccaaggcagaccacccttaattttcagtacttctccaactgtagcatgaataacaattatggtgggagggaggcattaaaatgcagattgctgggtctcactctagattctgattcagaaggtctgagaggggctcaagaacatgcatgtctaacaagcacctcgggaatgctgacactgctgctccatggaccacactttgagaaccactgctctagagagtcaatgagtccatgggtgtcaatgagctgccaaccagcattttacaattcttaagtgcaagcagagattaaatattcaaaagagccaagccattaaaaaaaatctattctaaaagacagtgagcaagataaacaaaaacgaaaaaatagtgacataaaagaaaaagactctttggcaagaagacaatgtcattaaatcaaccattaccctcagagagagaagataaaaaatattacatctgtaataatagaatacatgttatttttctaaaaggaacattcaaagatcaaaagtaaagttcttagaaattaaaaacatgatagcagaattgaaaaattcaatagaaagactggaaaccgtcatctagaaattaaagcaaaaatttaaagaaagagcaggaagggcttgtccaggctccccaaggagtctggaatgggaaatgtgtactgaacacttaacatatgccgggctccggactccatgccaggatgcaggaatgcacaaggtcctgccatgggagagtactcaaggagctcttgaaagacctgttgccaggaccagtgacctggtgatggaatgcttagaagagcgggacaagtacctgaactcctgaaggagtgaagaacaccttcactcctcttgtaggcatttggattcctaatcatgcctttatgcaagacttggcctaagtgtttggggaacctgttgttctctccagtgccagcctcagctcccaggccaattctctgaatgttgaggagtctcaagacctctggctttgattgtcctcattcattgatgcgggacacatcagggttggccagagccctgaatgttgcctgggctccactgcagttgacttatctgttcctggaaagtttgtcatcatctgtgccctaaagagtactacagccatctttcaacagaagtatgggctactcccctcacacacgtcctgcctgtgaaactcaacaggcgggaaggcccaataactggtgctggatcctatttgtctgtcctctgatgactggcaagccctcattggcagaggccactggatctacacactagcttgactctgggcagtgcgtctttctgaacactggagatcaagtgccagaagctgttgtttagctgtgcacctggaagaaaagttgtatttattatgtgtagtttcgtgtatcagccaaaagctcaatggagaggttaagaacattcctaggtggccttattctaataagtttcttctctctctccttttctaaattgaaaagtaatttaaataacagatttagaatctagtgagaaccttgtctctgaagagtggtggcatttaaggttccaaccagatagaagtatcggtgctgtttaagaagtctcaggtgatcacaggcgtctgttaggctcttgaagctggaacaagattaggataaagattgcagagccacaggccaaatgccctgttcccctgatctggtggggcagtgatgttgtgtattataactgctggggggtgagggtgagtagtcattttggtttaatagtgggaggtctgctcagttggcagggggtagaggtggggagagggagtccagataaatgaattttggaaaatacatctctaataatcctttgcagccagtgactttattcttacttattcaaaaaataagttacggttaattatacctacaacacctctatttaaattcagatttgctcagcagccctttgtctttattcatatgcataccaagtgtttaacataattatggttgggcatttgaactttgtttttctttaacataaagaaatgctactactaaacatatttgtaagcagaaaataattaaagaaagaaaattggagatataagacattttttaatttagaggactagcccatggagtctaacatctggcttaaaggatatccagatggaggtgagatcacatggagggaagagcatgctcaaagaatccaagaagctttctcagattcaaaggacatgattttccaaactgaaggggcccatcaaatatctagcacaacagaagaatatagacctacacctcagcacacttacgtgacactttaggatacagcagcaacccatcctgtaaactcttcgtgaaaaaaaagttacatttaatacaaaggattgagaatcagtatggcattggatttcttaaaaatggtactagaagttagaaaacagatgaccaagtcattcaaaaccataggtaaaattatttccaacctagaatttcatgcccaggcaaactattagtaagtagaataaatatactttcataaaacaaggtctgaaaaactttacccccctattgctttatcagggagttactgaaggatgaactccactaaaacaaaagtagaaaccaaaaaagaagacctgaggtacagaaaacagaagatctaaaacaagacagggatgaagggactgtccaaaaggatggtgaggatcctaagatgcagctgcatcctaagcccagagagcaacaagttcaggcagaatctggtcagaagctctccggagatgtctttaaatgtctgggtgcttgaatacagtaagaggaaaattacataaatcagagagagtttggaattagtaataatgacatgggaaaccaagcaaataagagagcccaacaaatattaaccttaggaaaaaataaatttttaaaaatgagaagggaaagaaagcactactctgtatagctcagctattaatattgggactactcagaaacactgatatgaacatgtagtattgatctaatgaatatgacaactaccttgagagaggcatgacggaagcatatgtcagagatatggcagagtgaaatagaactcagtattcatctgctatcatgggaagttaataacactgaaattattattattattattattttgagatggagtctcgctctgtcacccaggccggagtacagtggctcaatcttggctcactgcaacctccaattcttgggttcaagtgattgttctgcctcagcctcccaagtagctgggattacaggtgcccaccaccatgcccagctaattttttttgtatttttagtagagatggggtttcaccatgttggccaggctggtctcaaacttctgacctcaggtgatcacccaccttggcctcccaaagtgctgagattacaggcatgagccaccacacctggcaataaaactgaaattattttaaaaaagattttgttctataaatatattacttctaaacaaggagataagtttttaatatcaattaaaaagaattaaaagtgattttttagggaaaatagagagaggagatgaggatgtcattttgtagcaaaccttgtaaactatgtaattcttcaactcaagtacacagataagtcagaaaactgaaaaacaaataactatctaaaaatataaacaaaaagaaacacataaaatcatatagaaggacacttctggaatggtggtataaggagctacataaaccctctctttagtgaaacaaccatacctagtggaaaacgtttaaaaaaaatatatatatatatatatatagagagagagagagagattctatgccaggtgaagcaagcaatataaaatatatttataaatatatataaatatatataagtatatacaaaatatatatatatatatatccctggaaatcatcctgagaggcataccacaaatgtagaaacattatttcaagaaaatcaactaagtctctgtaagaacaacaagaatctgaagcatctgagccatgacattttctctccctaccccactcccaactcagtataatcaaagctatactccaggaacttacagccaagaacataaggctaccatttcccttagtggtacaatagctacagtttctccccagggtggtgaagccaccagcatttctcatccacccttcctctggctctgtgctacagaagttctactccaagtaagcctggccaagatgtctggggttcccctcctccatccagccccctctcataggatggaagttctaccccttgcttggcaagccaagaatattgggccccaattatctttatcccagcccacttgtagggtagagattctatgccaggtgaagcaagctaagaataccagaggctatcaccccatttaatgctccatgcatagatcaggggtatagaaataggcctctattcctactttcaacttaagagcagattatatttctgagttttctattctgctccattggtctatgtgtctgtctttgtaccagcaccattctgttttggttacggtagcttttttgtttgtttgtttttttgagacagagtcttgctctgtcacccaggctgaagtgtggtgccgtgatctcagctcactgcaacctctgcctctcagactcaagcgattttcccacctcagccttccaagtagctgagactacaggtgcctgccaccatgtccagctaatttttgtgatttttggtagaggctaggtttcaccatgttggccaggttagtctccaactcctgaattcaagtgatctgcctaccttggcctcccaaagtgctgaggttacaggcgtgagccaccacacctggcctactgtagctttatagtatagtttgaagttgggcagtgtgatgcctctggctttgttctttttgcttaggattgcattgcctattcgagctcttttttgaattttagaataatttttcctaattctgtgaggaatactgttggtagtttgataagaatagtgttgaatctgtaaattgctttgggcagtatggccattttaatggtattgattcttccaacctataagcatgaaatatttttatatttatttgttttgtttatgatttatttcattggggttttatagttctctttgtagagattttttacctccttgatttgctgtattcctaggtattttgttttctttgtggctatggtaaatgggactgtgttctttatatgactctcaccctaggtatcattggtgtatagaaatgctactgatttgcacattgattttgtatcctgaagccttgctaaaattttttatcagttctcattgccttttggtggagtctttagggttttctaagtatgggatcatgttgttagtgaagagagatagtttgagttcttcctttcctatttggatgccttttatttttgtctcttgcctgatagctctggttaagacttccactgctatgttgattaggagtggtgggagaggccatccttgtcttgttctggttctcaagggggatgattccagcttgtgctcattcagtatgaggttggcagtgggtttgtcatagacggctcttattattttgaaagctacacacctacaactatctgatctttgacaaggctgactaaaacaagcaatagggaaagaactccttgttcaataaatggtgctgggataactggctagccacaagcaaaagaatgaaattagacccttacctttcaccatatacaaaaattaactcaagacagattaaagatttacatgtatgacctcaaattacaaaaatcttagaagaaaacctaggaaatacccttcttaacattggccttagcaaataatttttggctaagtcttcaaaagcaattacaaaaaaaaaattttaacaggtgggacctaattaaactaacaaacttctgcacagcaaaagaaactatcatcagagtaaatagacaacctatagaatgggagaaaatttttgcaaactatgcatctgacagatgactaatatctagcatctataaggaacttaaacaaattgacaagaaaaaaacaaccccattaaaaaatgggcaaaagacatgaggagacacttctcaaaagaagacatacaagtggccatcaaacatgtgaaaaaatgcacatcatcactaatcgtcagagaaatgcaaatcaaaagcacaatgtgataccatctcacaccagtcagaatggctattgtcaaaacataaaaaagcaacagatgctgacaaagacgcagagaaaagagaatgcttatttagtgtttgtgggaatgtaaattagttcagccactgtggaaagcagtctggagatttctcaaagaacttaaaacagagctaccattcagcccagcaatcccattactgggtatatacccaaagggaaacagataattataacaaaaagacacgtgcattcatatgtttatcaccaccctattcacaataacaaagacatggaattaacctaggtgcccatcaatggtgaattggataaagaaaatgtggtacatatataccatgaatactatgcagccataaaaaagaatgaaatcatgtcctttgtagcagcatggatggagatgaaggacataaccctaagtgaaataacacagaaacagaaaccaaataccacatgttctcacttatatgtgggagctaaacattgagcacacatggacattaacataggaacaatagccactgcaggctacttgaagcgggagggagggagtgcacatgggttgaaaaacttcctattagatgctatgttcactatctatggacaatgtacccatgtaaccaacctgcacgtgtaccccctgtatctaaaagagaagttgaaatatatataaaatctcttcccaagagagagacagtctatagaaacagagaactctgtagctgtccctaacaggactgtctttatttggaacagagcataggaaagtccaagccaaaggacattgtgaaaaaacaatggagattgtggtggtaaacaattaacagaaggcttatagcttcatgatatcaatatgtgaaataggagagaagctagaagtttatcagaaagaaccatggggagaatcagttaagaagagtcatctggagtcagagaaagcctcaaaaactacctctgcaaaagggcctgattttaattggattagaaggtggggcaatgtatgccccagggcagtgcaaaaaacaatagtgcaatcagctagcaataagtggaagataatagttgagtgtgatctcaacaccgtgaaaacagcccaaagcttaatggggagatcacacgaagagattggtcacagaaagcctggctaaaactgttgtcatgcatgtccaagtcagtaccctgtgaggagcaatatcaaaggtgacacactgcagaggaaacagacttcactaaactggtccagccaagtcactagtcactaaacagataaaaaaacaaataacaccaacaagcctcaggggagggaggttggtgtcgaaagctgctacaatatattatctaagatgtccatgttttagtgagagagagagagagagctagagatggagagaaagagagagaaagagagaaagaaagaaagaaaaagaaagatcattcaaaaacaaaaataggaaagagtgacacatacacagaaaataaaaaatacaaaccaggcaacagaaagtacctttaagagactcaaattgtggacttagatgaaaacatcaaagattctcttataaatatttccaaagagctaaagaagccatgctttaaaacagtaaaggtctatatgtttacaatgtctcatcacatagagaatatcgacagagatataaattgctgaaacaaaccaaatgaaatttctagagttgaaaattacactaaccaaaatgaaaaattaactagaggggctcaaaagtcaatatgagctagtagaagaaagaatcagcaaacttgaagataggtggatagagatgatgcaattggaagaacagaaaaaaagaataaagaaaaattcacagtcttagcaaatgtggggaaccatcaaacacttcaagcagtgaagtgcaatgagcatatcaaaccagcagagagagaaaagagtacaaaaaaaattttaaagaaataatggctaaaaacagaccaaatataataaaactttttatctacaaatccaaatatctcaataaattctaagtcagataaatgtaagagatccaaacccagatacattatagacaaaatgttgagtgccaaagacaaagaaaaatcttaaaagcagcaagactaaaacaacttgacacatacaagaaaactgcaataatttcaacagctgacttttcatcagaattaatggaggctaaagcagtggatgacattaaaaatgctaaaagaaaaagagagaaccaataattttatattcagcaagacaatctttctaatgtgaaagcaaaaaaggcagagaatttatagcacgcagacctgtcttattagcaataccaaagaaatatcttcaaactgaatgtaagtgacaggagagtaattcaaatttatgagacaaaaaacgtaatatatagttattggtaatatatgccaataaaggtaattatatagttgagttaattgtaaaagatagtataattgcatatttcttttcctttcttctctcagttgatttaaaagacaagtgcataagataatatgtatggaattatattattgggcccataacttacaaaattgtaatatatttgacaataatagcacaaaggaggcaggtggaagcaaaattatatcagagaaagaaaataacacaagttggcaactaaaatccacaggaagaaataaagagaaacagaaatgtaaactaagaaacaaacatttattattataacatgtaacaaacattataaatatattaaaaagagaatgaaggaatggagttatgtaagaataatgtttctatatttcacttgaattaagttagcataaatctaaagtagaatctgataagttaatatgtatattgtaaatcccagagaaaccagtaaaaaagaaaactggaaaatatatagtaaaaaactcagtaaagaaatcaaaatgctgcattagaaaatattcacttaatgcaaaataaagtagtaaatgagaaacagagaaacagaaaatacgtgtgacatattttttaaaaaaagtaaaataatagacaaatccaaacatatcaataataacattaaatgtggatgaattaagctacctgaccaaaggcaaagattgtcagactggacaaaataaaaacaagatccaactatattatatctacaaaagacaccctttaaattcaaagatatacataggtttaaagtaagaggataaaaaattgtatatagcaataaaagacttggagtagctacataaatatcagatgacataaactttaaaacaaacataattatagagataaagaaggaaattttataatgacaaaaacaaatttgtcaagaatacatagcaattataaacatatatacaccaaacaacagagtccccaaaataggtaaagcacacctgacaatgcaaaaataattgtttcatatctcactttcaataataaatacaaaaactaggcaaagagtcaacaaagatatagaggacttgaataatgccataaacaaccagacctaacagacatctacagcagcaatcttcaacctttctggcaccagggaccagtctaatggaagacaatttttccacaggcgggggtggagggtcggcaggggctggtttcaggatgattcatgtgcattatatttattgtacactttatttctattattattacattgtactatataataagataattatacaactcatcataatgtagaatcagtgggagccctgagcttgttttcctgcaactagatggtcccatttgagggtgattggagacagtgacagaacatcaggcattagattctctcataagaagcacacaacctagatccctcacatgcatagttcaccatagggtttgtgctcctgtgagaatataatgctgctgctgatctgatagggaacggagctcaggcagtaatgtgagtgatggggattggctgtaaatacagatgaagttcgctagcttgcctgctgctaacctcctgttgtgtggccttgttcctaataggccatggactggtaccaaaccatggcccagggtttgggacctctgatctatagagcacttcaaccaataagagcaaaacgcacattcttctcaagcacacgtggaacattctccacatagaccatatattgaaccacaaaaaaagcccaaagaaatttaaaagaattgaactcatactaactgttttcactgaccatagtgaaataaattagaaatcaataacaatataaaatttgtgaaagtcgtaaaatttggaaattaaacaacatgctcctaaataactaatatgtcaaagaacaaaccaaaggaatatcagaaaatattttgagatgaatgtaaatgaagacataacaccaaaatgtatgtgatgcagattaagcagtgacagagggaatttttaaactgcaattgcctttattaaaaaataagatctaaattcagtaacttaacctaccacgtgaagacactagggaagaaaaacaaaaagcaaattaaacctaaagcaagtagatgaaataaaataataaatattagagatgaaattaaggatagaaaaacaatggaaagtcaataaaatgaaaagttgtttctttgaaaagattaacaaaattgagaaacctttatttagcttgactaagaaaaaggaggattcaaattactgaagttaggaaagaatcaggaaatattgttagtctactaaaatagataaggaagtactatgagaaattatatggaaataaattatataatttagatgaaatggacaaattgctagaaaagaacaaatttctggaaccaggtaaaaaagaagtagaaaatctgactagacatatagtaagtaagaagattggattagttatcaagaaactacccacatacagtgtggtgattcctcaaggatctaaaactagaaataccatttgacccagcaatcccattactgggtatatacccaaaggattataaatcattctactataaagaaatgtgcacacgtatgtttattgcagcactatttacaatagcaaagacttggaaccagcccaaatgcccatcaatgatagactagataaagaaaatgtggcacatatataccatggaatactgtgcagccataaaaaaggatgagttcatgtcctttgcagggacatggatgaagctggaaaccatcattctcagcaaactaacacgggaacagaaaaccaaacattgcatgttctcactcataagtggcagctgaacattgagaacacatggacacaggaggggaacatcacacactgggcactgtcgggaggtgggggaaaggcaaaaggggaaagggaagggagagcattaggacaaatacctaatgcatgtggagcttaaaacctaaatgacaggttgataggtgcagcaaaccaccatggcacatgtatatctatgtaacagacctgcaccgtcagcgcatgtatcccagaacttaaagtaaaataaaaaataaaatatataaaaaataattacttccagttccatagtaatcacactaattagaattttccaggcaaaaaaaaaaaaaaaaaaagaaactaccctcaaaaattgcccaggcactgatactgatggccttattggttaattctaccaaacagttgaaaaaccaataaggccaattcttcataaacccttctaaaaattagaagaggagggattgtttcccaactcattccacaggccagtattaacccaataccaaaactagacaaagatatcacaagaaaattacagacagaatctgtagtggatgaatttcataatatgccttataaaagtagatttaaaatactagaaacccaattcagcaatacacaaaagaattgtacatcatgaccaaatagcacttatcctaggaatgcaaggttgtttagcatctgaaaaatcaatgcttacaacacgtattaatacaataaagaatacgatttttgagatcatttcaatagatgtggacaaaacatttgacaaaagccaatgcccttttatgataagactactcagcaagtgaggaatagaaaggaactttctcaatctgataaaggaaatctacaaaaccccacagctaacataatatttaatagtgaaagactgaatattttcccctcaagatcaagaacacagtaaggatgtctgctcttaccacttctagtcaaaattgtaaaaaagaaaaaaaattatccaggtaattgggcaagaaaagaaataaaagacattcagattgaaaaggaagaagtaaaactatttattggcaaatgaaatgatcttgtatatagaaaacactgaggaatccactaaaaactattaaaactaacaatttgagcaagattgcaggatacaagatcaatttacaaatttcagctgtatttctatacagtttcaattaacaacctaaaaatcaaatctagaaatcaattccatttacaatagcattaaaaaaatagaatgtttagaaatatgtttaacgaaagaaacataaaacatgtattcagaaaactataacacatcactgggaaaagtaaaaaagacctaaatgaaacacctcattaacgtagatcagaagacaatattattacaatgtcaatactccccaaattgatttagaaagtcactgcaattcctattaaaatattcgatggcttttttacacaaattgacaagtacatcctaaaattcatgtggaaatgcaattgactgaaatagtcaaaacaaacttgaaaaggaaaatcaaagttggaggactcataattctcaactccaaaacttacaacaaagctacagtagtcaagacagtgtaatattggcatcaggacagacacataaattaatggaacagaataagaattgagaatccagaaatgaacttttaactttatggtcagttgatgttcaacaagggtgctgggataattcaagggggaaagactaaactttttgacgttgagacaactagatatccacatgcaaacgaataaaactgaaccacttcctcacaccatacacaaaaagtaactcaaaatagatcatagatgtaaatgtaagagctgaagctataaaactcttagaagaaaacatagaagtgagtccttgtggccttgtattatgcaaagtcttcttcagtagcccaccaaaagcacaagtgataaaaaaaaaaaaagtatatatcagacttcagcaaaattatcaaaattaaaagcttttgtgctgcaaatgataacatcaagaaaatggaaacacaacccaccaaactgaagaaaatatttccaagtcatgagtctgataagggatttgtattcaaactataaaaagaactcttacaactcagtgattaaaaataagctaattaaaaatgggcaaaggatgtgatgaggctttttccccccaaggaacatgtgcaaatgaccacaacacatggaaagactctcaatatcattagttatcaaggaaatgcaaatgaaaaccacaatgaggtaccacttcactaaggatcaaaatgagagatgataacaaatctttgcaaggttgtgaagaaatggaaaccctcactcattgctgctggaaatgagataagacacagccactttggaaaccaactgggcagttccttaaaaagttaaacatagagataccacgtgacccagcaattcaactcccaggtatcaacccaagggaaatgagaacatatatccacaaaatacttgtacatgaatattttagcagcattattaataatagctaagaatggaaacaactcaaatgtccattaactgatgaataggtaaataaaatgtgatatatccatataatgaaatattattgagcaatagaaaagaatgaagtaattacaacagtgtggatgaacttaaaagcactaagctaagtgaaagaagccagtcacaaaggatcccatgtggcataattccatttatatgaaatgtccagactaggcaaatttgtagaaatagaaaatagattactggttgcctagggctagggcaggtggagtagaaagagaacagagaatgggaaaaggagaattggagtaggtaaagagctctgtgttaggccatacttctgttactctaaatacctgagactgggcaatttatagagaaaagaagtttaattggctcatggttctgcaggctatacaaacagggtacccacatctgctcagcttctgccaagaatctcaggaagctgacaaccatggtggaaggtgaagagggagctggcacgtcacatggctagagcaggaacaagagacagagcaagagaatgagtggggagggccacacactttcagacaatcagatctcccccttcaggccccacttccaacactggggattacatttcagtatgagatttggatgggacaaataaccaaactctatcaggttccattttgtgatgacaataaggttctacagtcagatttgatgatggttgtataactctgtaaatatactgaaaaccattgaattgtactcgttaaatgggtaaattatatggtatatgaattacatctccatatagctgttttagaaacgcatgcacaagagacagaaagttacagactatatttaccaaagtttctgagtgatcatggagactgtttattaaataacatgtctttgccaccttgaagtcatgccattcttcatgtgagatcctgtttcacagcaatagctcatgaacttgttataggtatagaaatataataaaaatgcagattcaactcatttttatttataacattaacactataataaggatgtcgtttcgactactgtatcccagatattatgagtactggctggtctctatagccctccacccttccctgccgtctctgtgccctaagcagctaacttctatggactgcatcaccttgactccctcatcgcaagcgtttaaatgtttgtgtcctctcgttaggctgtattcctaatgaccgcaagccctgtctgcaacctcctcctacaattcttctgaccataatgagggtcctataatatccttcgctccccttgccctttcactcttaggagtggagaagctttgtgctggctcctgatgtgatgctattaggaggtctttggaagataattaggtcatgagggtggaaccctcatgaacggtattactgtccttgtccaagagactccaaggaattatttcaccctctttccaccttgtgaagatgcaatgagaagtcagcagtctgcaatcggccctcaccagattgccctgaaagagggccctcaccagaaccgaacatgctggcaccctgatcttgaactccagcctccagaactatgagaaatacatttctgttacgtataagccacgaatctatggtacttttattatcacagattaaatgaactaagacactgatttcattgggtttggccaacagagacctggacaggaacccagagagcagaaagagagaggcttgccccacaagccctgtctgtgacctgcttcttacagttcttctgaccatgatgagggtcctataacaccctttgctcccattgccctttcactcttaggagtggagaagctttgtgctggggccattcctgagtcatgtcatcctctcgtactcggtgcccacacctcagttcacagttgctcactgctcctgccatccgtttccagctgggaacttggtagagacagggcaagcacaccagttccttacctaacaggaaccctctatggtcaaagggaagaatttattccactgttcggactgatcacgtcatgttctgcctaccttggccttgcagacccacgtctgcaccaaacgacatgttataacgatgctctgttgggtggccttttgcttctagttttctatgacactagagatactcttgcaagcaacagagtttaactttagaagctgaatttttatcctacaaaaatgagcttaccataaatacggtcagtgtgcctattttataatgtctcaaatagaatagtaagaatcaaaacaatcttaaaagtaaattgtgttacacaaatttgatatccaaacaacatttaaagcttactggatatgcattttgaagtggaaacctgaattcctggcttccaggcccggttagtgcctccacctgtgtctcatctgcctttgtctgggaagcagttttcagacccagctgagcctgacccagtggaatctccggtgcttagcacagccagactgatagagttcgcctttcctcagaatgcaaaacaattcatccagaactagcaagtccacagataagggatatttatgcttattgtgccagatctctgaatggctgatttaaaaaattatataaaataaaataaaatcttgtgtgtctcttgtgggttaagaaatggaggccgaggcaggcggatcacgaggtcaggatatcaggaccaacctggctaacacggtgaaaccccgtctctactaaaaaaatacaaaaaattagccaggcatgctggcgggcgcctgtagtcccaactatgtgggaggctgaggcaggagaatggcgtgaacccgggaggcggaacttgcagtgagcggcaatgcgccactgcactcctgcctgggtgacagagcgagactccgtctcaaaaaaaaaaaaaaatgaaaagaaaagaaatgcattgcaccattttttcatggctactttaaccagaggtggcctacatttatttccttccttcaggtcatataacatcagatcttttcattagcatgatagctggagatgtatttagaagctttttctttatagcaactaaaatacccaacatacaaaacatttacagtatttcatttatcaagaacctatctctttgtggcagacacaaaacctgacttgaagtcagttaaggggtgatgtgacttgggggatcttcagaaaaagcctttgactgagaatatcacccctgctgtcagtcactttactgcgataatattttccctttaagccaggatttcccaaagtgcgtggagaaagacacaaccaacgcattacctttggttacttcaggggatgggactggaaagcacttggggaggagagagactgttaacattttatacattttatcatttagctcatcgcaacaattgtatattactaaggcagtttgttttcagaaatctgataccgagccttttaaaggtaaaatgtaatagaattaggggaatgggaatacattttgggaactctgcgttaaaccaggttctcattgataaacatcaacctctatcccatgccacagagggcacttcaaagccacatcccaggcctggtacggtggcttgcacctgtaattccagcactttgcaatgccaaggtgcgaggattgcttgagcccaggagttcaagacccacttggtcaatatagtgagaccctatctctacaaagaaatattttttaaaacttagcagcatgtggtggcatgaacttgtaatcccagctattcaggaggctaaggcaggaggattgcttgagcccaagagtgagaggctgcagtgaaccatgatcataccactgcactctagcctgggtgatagagcgagactccatctctaaaaaaaagaaataaaacgcatcccagcctgaaaactcaccttcttctccgacgccacccaatgcatgatcaccctaagtcccagaacaaccagatatccacagctccaaaacacaccagaaattccctcctttccctctgccagggaagagcccacccttcacccatctggatccagtttaaatatcacctcctctaacccaggctatggtctagcaccctctctctggtttcccgcaatattctccgcaggctgtttacccacctcacattccgggagggctactgagggctcatacgcttggatggaactcaatatcaggtctttactgagaaccacgtgctcctcccatgtggagctctttataatcattccctcattcaacaccctatgagccagagaggattactttctctgttttactaacaagtaacctaaaatttggaaaagatgcaaaactagcccaaagttgcgtgtttagtgactggtgtagccataatgctgctgccaggccagctccggctgcccaccctctccctgggggccttgacgataagttattagctcctcgtgaggctggcagtgtgagtccaccttcataccctacaggagctggcaggatgaccacttgttagatgtttaataaatgattgttgagcaaataaagaaatgcttgggtgaatcagaaagatgtgattactattaacttctcactattaaaacataacaacttctgggcagggttccctcttaatcccttatcagactacctgatgtagcctctgtaatcaacaccttagcagaattaccacatataatccttcctgatagagtgcctgaaactcaatcgactcagcaaatgcttggctccttgccttctttcctccaagagctagaaggaggaaggttggatgtgtgaggtttgggaaagtcaccgcatgctgagaggacattgattcagggattgagaggacatcaaagacaaacttctcacacttgtccacaaaagaatcccaaggtccatacacttggagaagagagcttaatttcttataaagggttgcagcctctggccaccctgaaagactaggaagcatagccttcagcagagactgaaagcagctacttcgaaggaggatgggtgagacaggaatttatgctgaatgggttggctaagtatatatatttaacaagctataggaggggctgtgaatatttatgaggggtgtatgtgcatgcatggtaaacctgtgtgtaatatgcatcccatgttcactttggggtggagacgtaacatttaaatgcattaaagttaatctctatatataaaaagatgaagcagaggacaggaaggtcctcagtgtgcagcctctgtggacctgcccgaccaccagtctgtggctgagggtctcttatcaggagaaagttactaaaattagtctcttttccaatcaaagctgtagtatggtttgtgggattgggtgaggtgaggaggtcagttagtcagtgtctgtccatcagtgagctgcaattgtttcactattgctcatcgccaggccagtgtggagaaaaagaaaatctttgtggcagaacatagctgactctttaagtgcacaggtgtataacctaactcctccgcgcatggcctttagtcttgtttataatttggtgtcttattgccactctgttctgtcagtcttacggtccctgtttgagcacacttcatcatcttgattagcaccaggctggtgcactttattaaaaaatcaaggaaactacccagtctgactcaattcacttaaatgtcctttaggcatggccataaatactcaactttagaggtaacaaacatcatggatgcttttcacataatgctgtttcacataaaattctcggcaacccagttcttgtattgtaggtgaaataatcaaaacttcagagcgttcagtcaagatgactttgctacgtcataatggagctaaaggtcgaatgcagggcttgtgaatagactccaatctagcctccatctctctgtgtggcacccctctctggatgtggttgtcatctcctctcttctcttcttgtggcctcatctctagagttgaataagtaatgggtcgaatggtctggctttgctctttcccttttccagccctccaaccccctacttagtcagttaaagcaccaggtaaagaaataaaagaggtggccgggcgcggtggctcacgcctctaatcccagcactttgggaggccgaggaaggtggatcatgaggtcgggagatcgagaccatcctggctaacatggtgaaatcccatcactactaaaaatacaaaaaaattatcctggcatggtggcaggcagctgtagtcccagctacttgggaggctgaggcaggagaatggcatgaacccgggaggcagaggttgcagtaagccgcgatagctccactgcactccagcctgggtgacagagcaagactctgtctcaaaaaaaaaaaaaaaaaaaaaaaagaaaagaaaaatgaaaatgaaataaaagaggccacaaaatgggcctccaaaaaaaaaaaaacatcatccttagtctttcaagcgggtttgccccggcgtggtggctcgcatctgtaatcccaggactttgggaggctgaggcaggtggatcatgaggtcaagagatcgagaccatcctggccaacatggtgaaaacctatatctactaataatacaaaaattaactgggcatggtggcgggtgcctgtagtcccagctactagggaggctgaggcaggagaatcacttgaacctgacagatgaaggttgtagtgagccaagatcgtgccactgcactccagcctggtgacagagtgagactccgtttcaaaaaaaaaaaaaaaaaggaagaaagacagaaaaaaaaaaaagagggtttgcctcctcagaaaggtgacatgtgcttccagtcctctttgttctccaggttcttaactggagcaggacaagggtgttccactggaagtaattgtatccaggaggaaatgtttacgtttcctgtaaactccgttctggaggcatgactgcatatagaagttgaaaactataattagggaaagaattttaattttataataatctctgtatgtatatgtctcttattgggcgtgagggtaggggaaagaagttactttttttgggttaaaatggagcagtcagtatgagaaagtgtcttgagacttggattttagtgaattgtatgattaagcgcaagatccttaaccactctaataatccttgatactaagtacctatgaaatgtgaataggccggaagcggtgtctcatgcctgtaatcccagcattttgggaggccgaggcgggcaaatcatctgaggtcgggagtttgagaccagcctgaccaacatggagaaactccatctctgctaaaaatacaaaattagccgggtgcggtggcacatgcctgtaatcccagctacttcggaggctgaggcaggataatcgcttgaacccgggaggtggaggtcgcagtgagccgagatcgcaccattgcactccagcctgggcaacaagagcaaaactccatctcaaaaatgataaataaaaataaatgtgaataacattgcttgtgctattcttctcacacagacattgctaaagttaaaaaaagaatatgttattaagaatatgtaaaagcctataaagtgtcagattattgttattaattatctgttttcattaccataaaataagaaactggaagaagaaactatgctttctatgtattcctatttaaactctgaggggggttagagtttttccagtaatgaagcagttgttcattccatgttgctctgggagcaattatttgtttcctcagtgaaacaagtgaaaaaagaactgacgtgggttgatccttgatcatctctatttgcttgtacagataccgattactgcctaaccatcagaagagaatggttaaaatttttcaaagctctattcctacgtgtcaataaatccacaaaaataataatagctctgagcactcaaaagggtaaactcttcctgctccctccttaaccaccaaacttctgctttgaggaccaagtattttctctctgcctctaacgtatacccaatatacccaagtaattatgacctacaaagctgatgttttaaaaaataatagcattgctgagagataactcatatccccacacctgacctatttaaactgtacaagccagccaggcatggtggctcaagcctgtaaccacagcacttcgggaggctgaggcgggcagatcacctgaggtcaggagttcaagaccagcctagtcaacatggtgaatccccatctccactaaaaatacaaaaaaattagctgagtgtggtggcaggcgcctgtaatcccagctactcaggaggctgaggcaggagaatcacatgaacccgggaagcagaggttgcagtgagccgagactgtgccactacactccatcctgggtggcagagtgagactccgtctcaaaaacaaacaaacaaacaaataaatgaataaataaataaataaactgtaaaagccaaagaccatcactaagtctaattttagaacacttcacctggcaaagaaaccttctatccattaacagtttgttcccattaccctatccaaccctgacgccccaggcaagcaccgttctactctgtcttcatggatttgcctattctggacattttatataaatggaatcacacaatgtgtggtcttttgcgattggcttctttgacttaacatggtttcaaggctcgtcatgttgtggcatgtgtttgtacttcatacttttatggctggataatattccattgtattgatatcctacattatctttatccatttatcagtttatggacatttgaattgtttccactttttcgctattgtgaagagtgtcacaataaatattcaagtacaggtttttgtggacatttcttttcatttctcttgggtatgtacctaggagtggaattgctgagtcatgtggtaactctatttttaactttttgagaaactggcaaactgttttccaaggtggctacacacttttacctccccaccaccagtgtgtgaagttcaggacttatttttgaagactgatttctaagccaccctcttagatgaccggtgctcagatcccactggtgggtgaccctggccgtattacctacaaataagagcagctgtaccttggggagaatggcctctggctctgtattagttcgttcttgcactgctataaagaaatacatgaaattgggtactttataaagaaaagaggtttaattggcttacagttccacagactgtaaaggaagcatggtggcatcagcttctggggagggctcaggaaacttacaatcatggcagaaggcaaagggggagctgacacctcacatgaccccaagcaggaacaacagagagtaagaagggaggtgctaaacgcttttaaacaattagatctcatgagaactcactattatgagaacagcacccaaggggatgctattaaattagaaactgcccccatgatctaatcccctcccaccaggccggacctccaacattgaggattataattgaatatgatatttgcaaagggacacagatccaaaccatgtcagcctcttaaggaccgtgtgtggatggagcaagttgatatccacagggtatacagcaggtgctcaagcagtactggagtcccactgtggctgatggtcagcaggaaagcaacaagggtgaccgaaacatacaggttacaaacaatttttgttacccaattccaaaagtctcagtgaagacaggaacaagtttccaggtgaggacaaacagctgcttctcttatttgccctaggctcacacaggaaacaggttgagtcactcagcaggtttgtacctgcaaattacgagagagagcattgggaagactgtccgcataggtgaccaggccagcccagcagtgcaaatgacagcccaggttagcctggccggtgcaaagggtagtgttctgccagaacttgaaataactagttcatttggatgtgtttccttacattgccttaagacatagaggagctcaagcctatgcacatcctgtgttccataaaagactaaccttaggggaaaatgatgagaaagagtccattttactttctgtgcctcctgaccaggaaagactcactgctgaagccaacttcaaaagcaaaaccaggccaggcacggtggctcactcctgcaatctcagcactttgggagaccgaggagggaggatcacttgagctcaggagttcaagaccagcctgggcaacataagaagaccctgtctctacaaaaataaataaataaataatttatgtggtggcacatgaccgtaatcccagctacttgggaggctgagatgagagaatctcttgagcctggaggtagaggttgcagtgagctatgattgcaccactgcactccagcctggacaacagaacaagactctgtctctaataataattaataacagtaataaattaataagcaaaaccaagcaaacaaagccaaaatgtaggttaaggtggcaaccgggtaggtgtcaactctgatttaagaccagtgcagagtgaagacatcaccccatagctccttacctgactctaccccaagctttgccaactacacacatttgagtcttctgtttagcacggtcccaggaatctgtcgctcttgaaccaccgcgaagaggaacctggtaggtaactgagagtcttctgaaattttcggagtacagcgtggacaggtgtaatagagaaatagagggagaggactattgagaatataaaaaggccattacagaaagttacagcagggctgtggctttgccagataattgattttgaaaggtgacatagttatttgcagtttatctgcttgcagcacaaaaatagggcaaatcactgaaatctttcttaggggattgatgttcattttatgacatccttcaatgagcagaaacataaaagccaccatcacaccaccagcagcaggaccactgccatgcacgaagctctgaaacaaacagggggtactcctgaaaggctaaggaatgaacaggaacagagtgagcttgcctgtccagggagtgggcacactggccaaacccaggctgaccctgtgtgcaggtgggcacccattgctggcctgtatcgcacaggctttcctttgggtagggatggctttgtgcatgtggctgcctgggatgcccagaaaagtgtcagcaattcctggattccccgggtgactaggcacaatatgtttggtgggattggagctgaggaaagtgaactgggagaaatctggcaacaggaggactcaccctttgtcttcccactttttgaaatggagtctcctgacattttcctcctcatctcaactttctctccaagtctttcctgtctcctgggcagagaatcagagctgaccaccaattacgttatacccgaattttatagaatcactttttattgctagcatatcatagggggatcactgttttattttattttaaactattcatagtacctgtattacttctaaaaataacaaaacaagagatgagactctcataagccaggagcaatgtccaaatgtctgatgaaaaggaattgccaacgtaattcagcctaaccagcaatcttgcagggcaagggtagaaaaagaaataagatcttcaaagggtcactttccatgaactctttcttaattttctttgctactttgtagtagttttagctaaattttatgagttaaaaaaatgttggtaatatatttctttaggagcctaaggtcaattgtgtgactttttttttgtgatcaattcactgcttaaaaaatttttccttattaaaaaaataataattgtcctttaatgtcttcctggcttattgttattacaatttccatttattcaatgaaattctagaacaggcatcattgtccataaatgctctccatagcctgaaggacgatattaaagtcacttcttatccttcccttctcctccagtgtctcattccacaagttctttcccctgggatcctcttgggattttaggcatttgagccagactccaaggctttccttgcccttttgggctgtgtatcccaatgtattcttggaaggatctgcctactttggaaaaggatggcttgtcatgcccacgccttgggctcatggctgctgggggcctccctggacgcagtaaccagcacttgtgcaggctcaggtttgcccaattactgcctgggccccagtctgccactccaggccttttctcatgttgcgtcttcaacaccagtaccatcaacttacaaaattaaaaatttaaccaaactgggtgtatgataatgttactgaatttaactttttctttttttaacatttattttaagttcagaggtaatgtgcaggtttgttccacaggtaaacttgtgtcctgggggtttgttgtacatattcttttatcactcaggtattaagcctaatacccactagttatttttcctgatcttcttcctcctcttaccctctacccctctgaaatgccccatggaattaactttttattcttagttcagtcaaattattttgtatgggtggacacagtgaccatatagtttttgtatgggtggacacagtaaccgtatagttttttgttttattattgatgaaaatcagtatttttgaagtcaggctcttttctgttttgggtttttttttttttaatttcttttaaatatatctatgtcacatcttccacttcttttgaagaccttatttagttctattcaatgtgtaaagtacttcacacattgcagttttttgaaagtcatataattcatacctgagagagattttggggagcctctggctcagcatggtcactggaggcccagggaggtctagggtttgctgaaaatctgggaacagttagctcaaagcctggccggcgcccactgcttctaattttccatccgtttatctctccggccctgtgcagcactgcctttcccaggaaatgtgtgtgcgccatcttgttatctgatgtcaccagcactgcacaccaggatgccaggagcccaggtgtggggtaagaagagctgggcttgaatctcactctaccacttattagctatatggtagtctttgaccaccacattccttagcttcttagtgtgttagtttcctcatctgcagaatagagacaataatgtagtactgactgattcaaaccacatgtcatggattcaagaccatattcctatgtccctccaaagacttttccaacagttcagtggtgcctggaatttcttaatgaacatttcagttctgcagcttgaagttcactgctggtagattgccatcatccctggaaggggttgcacattacgcctccttaagcacgtgcactgattgatatagaagcaagtgtctaccaggaaaggaaaaaagacttcaaattctgagggaagcgaaaagtaaaaataaaaaagcagcagcagcagcagcagagaaaacaccattctgggataaacatccggagtgttaggcttagggtctcaaagtcagacgtgacaagcctcaccctgcttgttcagctccatgattattattttaaacatcaattctcatagtagaaagattaaaaaaaaaagctaacagtggacccagcacggtggctcatgcctgtaatcccagcactttgggaggccgaggggggcggatcacctgaggtcaggagttcgagaccagcctgggcaacatggcgaaaccctgcctctactaaaaatacaaaaattagtcgggcatggtggctcatgcctgtaatcccagctactccaaaggctgaggcaggagaattgcttgaacccaggaggcagaggttgcagtgagccaaggatcgcaccactgcactccagcctgggtaacagagcgagactctgtctcaaataaacaaacaaacaaacaaacaaatagtgagttatagctagaagaatcttgaatagtagccttgttgtgttcaaaacatacccatgctttataaaatcagagctgaagaggttggtgtactataacacagatttaacatcctatctaaattatttgaggtgaaggattcattattcatgattttcacacccaaaaatatttacttcatagtattcatatttggacatgtcattcagattattccattttattttaaataacgtaacaaaacattttagacatctgatttatataatagcaataccaaggacttgcaccctgtttctacctaagttgtttctgaaaaccatcttataactcatccattgccaagtaattacaatcttaactgtatcttgaaaacagtgggtttcagctttttattatcccagttattgctctggaatcattgtagtgcaccttcttcatgaccccattcattcaggtcaccagctcactctatgtttaagaggcctgtctctagaaagaaggagaagaggggatacgtaaagaattgaaaacagcttcaatttgattcagtagcacagtgcactaaaacccataagccacaacaatcaacaaagtgtggaattcacactgttctactcaattccatcccttgtattttttacagcaatatctttattgtgctgaaagttatcacatgtactccggagtttctaacaaacctttatgttttacctttgaaaataacttctaagctgctatttctgcttggaattttatgttaaaggtggagaaaattgaatcaagcagtcatcaatgggtaccaccttccacagtcctacctccccagagttctgaagaattcaggtccaggcaaactaacacaggaacagaaaaccaaatgccacatgttctcccttataagtggaagctaaatgatgagaacacatggacacgtagaggcgagcaacatatacgggggccttttggagggtggagggtgggaggtgggagaggaccagggaaaacagctattggttactaggcttaatagttgggtgatgaggtggcctatacgacggagccccatgacacaagtttacctgtgtagcaaatccacacttgtacccctgaacataaaataaaagttaaaaaaagagacattgtcagaaaatacatggtgaatttaataaacagttttctttcaacggtaacaaaaaaatcaatgaagttggttgcccgttgtaagaattaaacgtccaataatttttaggcaatttttgatttctgagcttataactgagttgctgtaaaattgctgggattcctacacaaagaagaaaacctttttgatgaaaatttaaaaagaattttgtaccaattatggaggtttagttaaaaattattaagaacaaataaaagaaatattttacacacaaaaaaagatgacgcttccctggctgctgtgacacttgtgtgttatgagcacaccttggtgttgtaggttggagtcctggaaggtgcttttttgacattgtcttaaaactttttttaaggcctaaggtatgaaataattaatcattagtacatttttatttgatgcactgggaatttttaataatttcactctaagtagttcccctcaaatacatgagcttttattttatatctttttagtaggcataactcaagtatataaggtagatttttaaaaagacattgtatggtatcttaaagttagcattcagttttctactgtactattttactaaatttttcaatacttcatttttatagacttctaatccctgctaccttatattatactatattatactttcctatacatttaatttgaaggcttttcagaactttgacatggctatgggcttagggattgtaggcattttccatgagacaaaaacatgtgacttccagcattgttttaatttgattattaaaaagtacacaaatattagtggaggaaaaaggacctacaatatagtgatgatgatggtggcggtagtggtgatgatgacaataataataacacatggtatgattttaagggcaaatagatatgcaaataggcttaatcctgaatacagtgaaagaaaactaaggcattgcaggcataaatacttcaaagctaggggcaaacactacaattggaccagaaccaaattgtctggactgctgggggtggctctaccagatccaagatggtgctagagttagtaaaccttcagctgtgataaagctaacaaagtgctctgtctcctagtaattgcaagaatgatatttgttacaatctcctttcttcaactccgagcaccagaatgccagctgcggaggattctgagttgggccactatcctgggtcgaattcagtctggaacaatagttctttgacttctatctttttcacaatttctcatttccccaactgatcattaatccacaagggattattgatctcccagtcagtctgtcctctctcctgccaagtaataaaatactacctttaatgctaatctgtataaatcaatgtcaggttcaaatatgaactgtgctgtagacttggattctttaccaaatataacaatcagtggatgcttcactcaaatattaatgattcattaactacccaccagtttctcattaagtgctgatataatctctccataagaatttattacaataccatagccaaatgttcaacatctagacaggaacaaactctctaaggagaaatcataaaacacgtacaaactcaggcagtcttcatccaaagtaactgtgttaatccagtgaagtgagtgtgtctgattgttttttgagctttatcacctcaaatcaggcagtcagttaactctctaagcttcagtgtgctcatttgtaaaatagatatagtggcctcacctcagactattttgagaaaatcaaggatgatgatgtctttgtaaccagcttatgcaaggggctgaacttgggaggttgtaatcaggaaatagttttccttttaacccaccacaatcttcaaacctacgtttcaattttctattctgcagcactgggtgatgtctcatggaagctagcttttctagtcagtttcaggtatttgtaaagtctcatttttgaatataaaaaagccagtctagtctaattccaaaatgtcaatatcttttgggttttcctgcagttcagctgtgatttaggctggaaaatctgcaaggataatgtcagggtgtcattttatccttccttgatccacttccttgctgtagtcttcagtattgagtaggaaggaagcatgaacctgaagatgcaaaactttatcttgacttggcaggtgctgtctgctccttcaccatggcagatgctcagatgccagctccttttctcccagggctctttaacggatatcttgggagcctacctcctaccctccaccactcccaccagccaagagatttccatgatggacatatgctttggctcactttcaggcttccccttgctaatggacaccctttattgatatccctggcctggccaccttctgtggagtagctcagagggaagaatgatgtggtcagctcccccttttgctgttagagagactgccacaggctccacacctctgagcatccttttttacctgcacacaatgggataatgacagtatctaccattgctgtctacctcctgggctgtctcaaggattaaaggaggtggcccagcctaagcacacttaccacagcaccttcccatgccacacctagcaggaagcaagcatgatcaaagtggttagaaccatgaactacaaaacagattacctgggtttggatttaaaatccaccactcactaattgtaaaaccttggacacatcaatggttaattgacctctctgtgccataattttctttctgtacaatggaaataatagcagtttctccatgtgccagatgctatgtgttgacattcagtggggtatctgccttcaaaatgctcccctaatccacagggtaaggcctggagactcacattccatctttctataccagtgggttccagggaagttctgccaatgagaagctgtcatgggctttctggagttggcctggagatcagtggaaggtagctgtttgagcatcagcaccagacagatgtggaaatttgcagcagtttccaagcaaccttctgagaattgtgcactttggagctccaagaatatgtgacctcccattatcctaagcaagccccaccaagccctaactgatacctggcttcatagagtggctgagaaaatcaagaaagtttgtacatagaacgtgctcagaacagctccaacaacattgtaagcattcaataaatgtcagctactatgttcattccgtattattcccaatactatgaattaatctatgcatatcagttgaccaaagcttcaaaactacaggaagaaggaaatggtaggagagctcagcacttcccctacagaccttgtattagtctgtttccatgctgctgattaagacatacccaagaatgggcaatttacaaaagaaagaggtttaatgtacttgcagttccacatggctgaggaggcttcacaatcatggtggaaggcaagaaggagcaagtcacgtcttacatggatggcagcaggcaaagagagagagcttgtgcagggaaactcccatttttgaaactatcagatctcatgagaattattcactatcaggagaacagcatgggaaagacctatacccatgatttaattatctcctaccgggttcgtcccacaacacatgggaattgtgggagttacaatttaagatgaggtttggggagggacacaaccaaaccattagagacctgaaagaggctgttgtactcactgattcatgtagtttgcatgtgtgtcctctctaaatcacatgttgaattgtaatccccagtactggacatggggcctggttgggggtgattggatcacaggggtggatttctcatgaatgatttagcatcatcctcttgatgctattcttgtgatagtgagttctcatgagatctagctgtttaatagtgtgtggcaactcctccctctctctcttgctcttgctttcaccatgtgatgtgctggcttcttctgtatcttcctccatgattgcaagctccccgaggactcacaagaagctgagcagatggtcagtatcatgcttcctgtacaacctgcaaaaccataagccagctaaacctcttttctttataaattactcagtcttaggtattcctttatagcaatgcaagaactacataacacagaaaattgttatcaggagtgagatattactgtaaagatacatgaaaatgtggaagtgactttggaactgggtaacaggcagaggttagaagattttggagggctcagaggaagacaggaagacgagggaaagtttagaacttcttagaggcttgttagatgattgtgaccaaaatgctgatagtgatatgaacagtgaagttcagcctgctgaggtctcagatggaaataaggaacttattgggaactagagcacaagtcatccacgttatgctgtagcaaagagattggttgcattgtgttcacgccctagagatctgtggaaatttgaacttaagagtgatgatttagggtaactggtagaaaaaaaaaatctaagctacaaagcattcaagatgtgtcttggctgcttctaacaacctactcttagacataggagcaaagaaatgacttaaagttggaagttatatttaaaggggaagcatatcagaaacatttggaaaatttgcagcctggccatgtggtagaaaagaaaagcccaatttcagtggaagaatccaagtgagctacagaacaaccacttattagagagatttgcgtaactaaaagggagccaggtgctgatagccaaaacaaggggggaaaaggtctcaaagacatttcagagatctctgaggcagcccctcccatcacaggccatgggttctaggagcaaataatgttttggggggccaggaccagggccacaatcccctgcacagtcataggactttgcttctcgcattccagtcactccagctgcagctggaggggccaagttacagcctgggcctccactctagagggagagagccatcagcctcagtggcttccacatagtgttaagcctgtaggttcacagagtgcaaaagtgaagaatgtttggcagcctctgtctacatttcataggatggatgggaaagccagagtgcccaggaagaagcctatctcaggggcagaaccctcatagacaacctctactagggcagtcatgaagggaaatatggggtgtgagcccgtacacagagttcccagtgtgggaactgcgtagtggagctgtagggagggggtcactttcccccagaccccaaaatggtagatccataagcagcttgtaccctggaaaagccacaggcacttaactgcagcctatgagagcagctgtggggactgaaccatgcaaagcctagaagcagagctgccatggctttgggaacccaacccttgcacctgtgttccctggatgcaggacgtggagttgaaggagactgctttggaacttgaagatttaatgactgccctgcttggttttgcacttgtgtgggggctgtacatgtaaatagcccctgtctttttggctgatttatcccttttggaatgtgaatgtttaaccaatgcctgtacccccattgtatcttaaaagcaagtaatttgttctgattttccagactcataggtggtagggactcaactccagatgggactttggacttgggactttggacttttgagtgatgctaaaatgaattcagacttttgggaaactactggctggggatgattatatttctcagtggaagaagaacatgagatttgaggggccaggagtggaatgatgtagtttagaggttgttccctctgaatctcatgttgaattgaatccccagtgttggaggtggggcctggtgaaaggtgatgggttcatgaaggcagatttctcatgaatggtttaatgccaaccccttggtgctgtccttgatagtgagcatgttctcagaagatctggttgtttaaaaatctgtggcaactactccctctcttttgctcccactctcaccgtgtgatatgttggctccccctttgccttccaccgtgactgcaagctccctgaggcctcaccagaagcagagcagatgctgatgccatacttcctatacagccttcagaaacatgaaccaattaaacctctcttctttataaattagccagtctcatgtattccgttatagcaaagcaagaacagcctaacatactgccactcaagaacaagaagatactgtgagagtccacccaaggggagcatgtttagaaatatggcaggaatataaatgatatcaacagacaacatctgcagaagaattaacagaaatgtaccttgtggatctctcacttcagctgctccagagaagttcatttaccaaatgcaaagggccagcctgaaagatatctcactattcagtacagaaatggggcacatacatggagggcaaggagaaaaatctgcatgttgtcaaaccactttttagatttaacttgaagtgacctcatatgaacaaaaacagatcagggaattctaagttagatcataggcaaagtagcatcatgctatgagggctgctgtaaacatcaactccgtgctaagtggttcagctgcctcagctttgtagtcaagagatgactccagggtgtttgcaatctgcattccttgcaaaaaagcctgcgttaacttcagctctgcagggagttgtgatggatgcattttgagtattgtggtgattatatttttgtttgcacctctcacgggacaaacacacaaaggcctagaatataagggagagcaaacaataaaacataaagccatttatggcacttggattcttttgcttgcagatgaagaaatggctcttttcagtcaagcttggctagtacacatctttgtttaggtctatttgtgctgccatcacaaaatgcctgagagtgggtaatttataaacaatagaaatttatttctcacagttctggagctgggaaatccaagatgaaggtgctggcaggtttggtgtctagtgagagtctagtctttgctcccaagacggtgcctgccacgctgcaccctccagagaatggaatgctgcctcctcacatagtggaagggatggaaaggcaaaaagaagccaaagttctccatcaagccctttgacaatgacattaagctatttatgagaacagagtcaccatgacctaattcctccctgaaggcgcacattccaacactgttgcattgcggattacgtttccaacacatgaattgtgggggacacatgccaaccatagcacccccaaaactctttgtcccaaagacctatcacagctgtatttttaaaccctaaagcatatgtcatttatgcctatctttctaatgatttctattgattgttatggctgcttaccccgcttcatctccaaaaccagaataaaaataaaatttattttcatacaaccttattatccttcaaatgatctttctgtgttaaaatggtcaaatcctgacagtcctggttctactgaaccctgaggatgaaatgggctcctagcgactgaagctttccttccttttctagaattatcattgtcaaaaacaaatgcttccttggtcatttaaaacaggtatatgaagtgtctcatatttaccccaaattaaaacattcaggtaaagaggcatggcaggtttttgagagcagttctgctttgcccctctcttcatctctctagttttttatgacattataaaaaaatgaacttactctttgggatcctatttgaatgcttaagatagataacataaaatgcaaaatgttgaagaaaaaataatgtttcatatgaggaaaaacagtgtttcacttgtattcatacgaacgcacacgcatatgaactctgggggaataaagataattaacactcataagttcagagttggaatggactcttgtagcaaaagacagattaatgagagaaaaacaaatggaagtttattaatgtgtatatttcataggtacatgaaagacgccaagggaatgagtagtcctcaaagggatggctttgaattctggcttgtatagcatttttaacaaagaacagtacatttttaaggaagtaacaagacaaagaaaaggacttgggttctccagggcagcagcttgcaggaagacacataatggtaaataaaggcgagttagggaagcttgctcgtggagatgcctctggtatcatctccagggtcatcagtgcccaaggttgtcttccgtggttaacctttgttctcccataggagaagaaggcagggcaggattccttttgtccttataagcctgtgtcctacttttaggcaaataaagggagaggagagctctttcctgtacctacttcttcttaattgccttcagttcaacagtcatttatattttggggtggtatattctggtccccacaatacatatgtagacgcaggcatacacacagaggaagagattattttcttttaagaggtatatcttggccagggatttccattccactgtgcagcctgactgcattcaaaatgcaggcaatgaaggaggccacttggtacactgcattctggaagagaaaaccaagacttgaacagacataaaagatttaaatttcaggctttcaaagttgagggctggaccagaaacaggcccccgccccctcccccccccccacaacacacacaggagtgaagacactaaaatgatttgttttctaatttacatgttaatcttggtgaagtaacagatccctcctgcatcctttcagggacattgcagtgcctaccagctaactaacaattctttcaacaagtgtgcatgcagcctctgctagatcctgggaaggcaacagacaactagagaaatgtggttactacctttatggttatttcttgatattggagaagagacacttacataaacagacaagtattcaaaatgaatttgtaatacagtaactgaggaagacttcaggcttccatgagaatctacaattgtgaggcctagccagttcaaaccaggtgagaaacagaagggttgggagtatttgatataagacagaatgaaggggacagtggtaaaccactgaagctgtgagctgacaaaaagtacaacaattcaaaaacatccacattgtgttggccaaaactccaagagttccagccacttcacctgccaagtatttgcctctgatattactgatcagtccacgtagcatttgggaatcattgtaactccttggttgccccacaaaatgcgcagtccattggactggactgaactgtctaagaatgatgactaggaagcttttggttttactcaaataagtgtttttccaccgtgcagttcatcatgagattggaggtggtatttccagggagtgcttatgaagatagcagaggaaaggtgccaagctggaaccaagcctgcacatcgccctactgggacatggcttgtttatgtcctactgccagtgggtccaggggaaaaccttccaaaccacatgagcattgccaagatcggtagcaacacaccattcactattaaccaaatctgaaaaacaagaaggcaaagtcaacaactccctaactcacacattgtgcaaaaattatgacttctgggtggttactaggaatatctcaaacatgagttttgaaaatttgcctgttttacctgaaccacacagtattgtgtcctagcatgctgatgtatatagtgattgaggtagaaaatgttcgatataaacaaaagacaacacagtgagggatggggtgagaaaaaaatacttctgacccatccatacttatggctgcaggcttgtcgttagaatgtgcatgtcatcttgatatttctccatccacttggcttctgcctcatttctcaccattttccttccatttcctggtgttttctccactccagccaactgctcactctctggcgtctctctgtgcttgcttttgtggcatgttggcaaaatgccaccttgacagtgtttggtctcccagcttggtctttgtgttttccctttctctcttctacctaaaaggaaaacagcctttgcttttcactgatgagtggctggcagcacccagggctagctcagtgccactgctggcaggcatctcatgcctgtcagcagtccagttactaaaggcagcattcagaggcgggggatctgggaggagggtcatcacctcgggaggtcagagctgatatctccaaccttcccacaacttttattaaaaattctccccacatcgggtacagtggctcacaaccgtaatcctagcactttgggaggccaaggctggagcattgcttgagctcaggagtttgagaccagcctgggaaacacagtgagatcctgtctctacaaaaagtataaaaattagctgggcatgatgtactggtttgttctcacactgctatgaagaaatatccgagactaggtaatttgtttaaaaaagagatttaattgactcagagttctgcatggctggggaggcctcaggaaacttacagtcatggcagaaggcaccacttcacagggtaacaggagagagaatgagtgccaagtgaagggggaaatggcagacgcttataaaaccatcagatcttgtgagacgcactcactatcatgaaaacagcatgggggaaccacccccatgattcaattacctcccacagagttcctcccacaatacgtggggattacagagattacaactcaagatgagatttgggtggaaacacagccaaaccttatcacatggtgatgtgtgcctattgtcccagctactcaggaggctgaggtgggaggaacacttgagctccagatgtcaaggctgcagttagccatgtttgtgccactccactccagcctgggtcctgagaccctgtcctctctctgccaaaaaaacaaaacaaaacaaaacaaaaaacaaaaaaccccttcccgtgaggaatcagtcctaatggtcatggcccagacacacctggaccacaggctccatcctccatggtgacagccttgtcattcccatctaatccctggccattctccaggcccagccccatgccagctcctcccagtgcctttccagttctctccagcctgaccattgttcctttctcagactcagagcccttgcagtccaaccaggcacagtgacagccctcattctaaggaagccacaccttgtttccttggccaagcttggaagtccttagagcaagctctgcacagaacatggtgtgtatcccccgtagcccttaacctaacgatgtccatattgtagggactccattggaaacatgtttagtaatcaccggccatgtggcaaggactaaggaagaaagaaatcatcggcatgctcttgcttctcaaggaactctctgtccagtaaagaaactcacagcatcccaggcatttgtaaccagaccttaaggaaacatgttggctgttctgggagtcaaaccacagaattatgcgactttgcttctaaaagcctcaagtctaaatttctgagacaagccaaattaaacacatcaacccagagacagcaaagaggttttgccacatggtacatatggatatttttcattctgagagcttagaatcatacatcattgatcccagaagtgaatttacagatcattgattgaaactgctagtagcataagggaaaaaaagtctgataggacaatatgatttatccaaagtgtaaccagagccctcccttttctagcaggacctcagcctcctaaaaaactttactgtataaacccctacatctcactcccaaaagacaggtgcaactctacagccttagtttctgaatttgtgaagtgggcatgattatagtacctcccagggctgctgggaggattcagtgagacagcagaattagtaaactgtatcattcataaagctctgttcaagaataatctattctattccaggaattctatgatgggggatgtccaaagtcaggtaaatgtcactgaagaaagatccattattacaaatcttacaaaaaggaaaccagaagggctacaataattttaatagtaacttctgggggcacaaacatgagtaataaaaaacttcaaattgttcatggtacaaatacaggaaataccttattattaagaagtgtctttgtggttacctgaagctttgagttttaatatatgctttctcagacccaaagctgtaagacttaagcgatttttttaaacttcacgaacttctttgagctcacaaaaatctctctggattgttttctttatacagtaaatatgggcttcattcctttttttatctggaattacttctaaagggggaatggatttaagtgcctgtttgaattaagcagctatataattttatttgaggagaaatataaattgtttagagaatgtacctgatgtatttagctaaaattgtcttttgaataatttcgagggggagggtagaaagcaataactatgccgcatctgctaatatagttttgtgaattagttgctatttattgattacatgtacaacaatcttatgagctagctatggataataccgcatttcagagatgcgaagagcaaggcagaaagaaagaagatgagctaggcattctataaagaacacttacaattttagaccaaagataagaacactttttccttggcacttgcaacacttaccttgctttattccttttataattaaatgtttaattgaagagacgaagttgtggcactctgtgttcagaggacactggactacgtgaaagtccacagagtgtgattatgcagtgaaggccatgtgtgtaaggggaaaagaaggggctcccctgtaaccggccttaggaaaacaccatctgcatctttctggggccagaatggtgggggtttccagcctaagagcgtctaagggaaatctcattcatcttagtgagaacatctaatgcattattggcttaccagtaatgctaaaaattttatcccaagaaggaacaaggggacatttaatataactgccaagaaagaactggtttgttctggagacacagcatacagagaatacagagctaggagcatggactccgggaccagacaggctcacatggccccaaggcttgggaagctgcttaaccttttcatacccatcttgcatctgaaaatggaggcaataaacagtacttagctgaaaggattgtcatgacggttaaaagagaacaatgcctggcaagtgctgggtggtgttgaataaacatttgctaaagtaaatttccagaaatcccgggagaaagtgaatgtggtctcatgaaaaccctaatagttttttgttcttgcgatagtttactgagaacgatgatttccaataaccctaaaacttaaagtataataataataaatttaaaaaaaagaaaaaaaaaaaaagaaaaccctaatagtaagaaggaattcaggacaaatcagacacacaaagctggtttagaaaaggtggatttgagcttactagaaaattcagaagggatgctgttgtaaaagagatacaggagatggtgacacctgggagggctcagggtcacttaatggtctggtaggcagcccaaggagtaccaagcagtgccaggatgtggaggaggtgatagatcgccaaagtggagggcatgtgtgccacccgggaccagggtatggcatggccaagccaggcagtgagcagccatggaaggcgtgcctcctgctcacattgccgtccctctgattttgtagtatgaacaaggaggcaccctggctaatcctgatgtaaacaactgaacatgctggacacatgttggccttgcggatgtgttcatgagcataaaacagcaactaatagcgagcatggggtcacaaagaggatgtcctgataaagcatcatttttctttttctagcaagattactgatctgttagatctcatctcaaagattaagaccccaggggaaagttggcttgagttcaggaagtcctttgacaaagactttcctccattctgtgaatgcagcggagactgaagaggaaaacttggaataattagaagaactgtaagccagttggacaattgcttccagcgtgctgattaatgagttgttacagagatcaatggattcagtattggcatggaaaaggattataatcttgacttctggcattcatattttatcagcaattggatggggccatagggttatcaattgttcatgtgacactagctgtagcaggtaggcactatgctgagtgctgaatcacgcttcaaacacattgatataatgagtatggagattccatttgggaaaataaaatagttctggagacatttgaacaaaaatgtgaatgtgcttaatgtcactgaactgttcgctacaaatagtgaaaatggtaaatttttggttgtgtatattttaccacaatgaaaaaaacatgaaagagaaaagattcttatagctgagagagacagggttataatatctaaattattttttagaggtggagtaaattattttttagaggaggagctgaaagtcaaagtgtcttgtgtgtcttacctcttgtgacaaatttttggtgataagttttggttcactcatgttgggtttggagccaggaatgcatttagaaacgatgtcagagagattccatcttatgcttatgtgggttttagtatacacaccatttgaaattcagtgatggtaactcatgaaaagggaacttcaaaccatcatttcaacataaataaccaattcaaataagagccctgtattaaaaacagttatgtttaacgaatttatctacaaataaaaattttaacaaataaattatactaagaaagcatatgggtaaagtctgcttgtaagtttaatctcatctatggcatatcatgaatatgttttatttaatattatattttcattctatttcgtttgcttctcataactacttttaaccaagtgtctctatgagaaatgttacctcactattcattgacaatgtaattgaactaagtccagcatatactagctcctctacagttaaaaacgaagtcaagacatttggactattaagaaaatattaagaatagaattgaaaaagtccaaattagatcaatgacacaacattttatttgtttgtttaatcatctaaaatgggaaaaatactttatcatacctcaatgttttaaaataatatcaattttagctattgatctttagaaaaattttattgaggaaatcaaagaaaaatcaggaaatgaaataattatcaagaagaaaacatacatatggttgtaagtggactataaactcagagaccttgggtttaatctcatgttctagcatgcattagctgcatggttatctaatctttgtgcctcagtttcctcctctgtaaaatggcctcagtacccaatgggatgggaaggaaataaggcaatacatgtaatggctaagtgcttcctgcttagtacctggtccatggtacatagagaggattagctcttctccttggaagtgtcccctctgttgtcaagattaaagggagaaatgccttcatcctcttctcatacacttcttggaagatgctgcctacatcacacacaggatgaggtatggtggtaccatcaaagacctggcaagaatcagatagcacccacaaagagttcgtgaagagagttcaatgaaaggcccatgtcttgaaatacaggtacaagacagcttgcacagtacccagggaccaaagtgggaagccatctctgtccctggacataattcatctctccctttccccctcaaatctccctcccctgcctctcactggggaagctgtgagaggctagagggtaagtggcctcaggatgtgttcatcaaggtcagcctcctggctcagcagaggcagagacacccccaccagggctcaactgcacgtaaccagctctgtgagtaagcggggctctctcattctccccagtggggctcaaagtggcaagtcccacatctgagtatccattattcttatttcttgattaaattgtgatgaagcaaggtatcacagggaacgcaacctgcttatctttcttaccaaatgaaatagctttactagctgggaggaaaagaacatgagtttttcagcaataacagtaaactcagccctttgaggattcttataaggtgggagctccctccaagccatgctaagcgtggggaatcctcagtgtcctgggctctgggtttccacacctaatgcatgcactgtttctccttatgcacaacccccttgtttgagctgacacctccatcgttgtaaccccaaatcaatgaatcagtaggcacacaggattacatcttttaaaataaaatgatggctgagatgctgaggaaccacgggctgcaggtgggctggccatctgtgctcgaatccacaccctgcatgggagaagatacttacggctcatcttggaagtcacaattttgaggtgtctcacttaatttccagtttcatttctcatcacccccacttcaatgaaccattcattctaatcaagtaggtctcagcctagtcttcaagtctcctggaaccattccatgattccatgctgttccctgcccagagcacctgcttggctcccccatcactttcccatttcccccttcagtggggcacagtcaaccccggtgctcctggcagacaccatcacagtaattaaatattattagtgcatgttttattgcatacgtacagccacaagctaaatgtgacattgccatagacctctctccctcttctccatggaatttaatgtcaccgtctctcacttagcacctatttagtgtctatacttagtaaggaatttttgtgtcttttctcttgaatcaggctgtcagtaacttaaggatgaaaatcttcttaaatgtgtacaagtcacatctgttatccaggacagagccttgatgtagaggcgtttaacctgtggctcttctcacgatgaaaccccagtaatgtgactttgaaaaatgtgtgtgatgtcaaaagtcactgtgataaacagctttacctctaccacacgggaaagattctatgctataattaggtgattaaatttgccaaggcacatttcagttgtagaaccattccaaaatcaaacaacatagccatcatagaaagtgctcagtgacccatcaggaaaactgatatgttcaaaacatttctagacaatggtaaatatgttttaaagtggaaaagcgttttgaatgtaaacaaaagtaaacattttgagctaaagaaatacacattttaggtcatacacatatatatgttttaatcctgatatatatatatatatatatacttttatatatatttatcttaaaatgtaaatatatatttttatcctgggatatatataaatacatattaattatctacagcaaatgacaggtaaacctcttgactgagcaaagtgctaagcagagacatctacaggtgagggtgggccaaggcgtttcatgaaccagggcagagccagatgtaagtggtgggaggaaaagggtcagatggcacataggaaggtcaatgccaggctgagcctcacagtaacaaccacagacccaaagcagatgaggaagcacagagccccacttactcaggagataagaatgatccaggagaagacgaaaggccctcagaacacaagtgtggcaggttcacctgcctggagctcccacaccttttctggaaagatagagctgccacgatggctctcagtggtatctgcatcttctgagctaaaaggtgccaccattgtgacaaccattctgctcagctcaggcccgagctggccaatggctcaggagcaaccactgcattaaactagtggccatgcctagtagtccagccatggccagcttcagaaccattgctcttctgtacaagaaaatgtaaatttacaaatggctgaggagccggcactgcctaaactagtggccatttctagcacccagccactgccagcttcagaataattgctcctgtgtacaagaaaatataaatttactcagtgcccattgaaaaagaaaacaaaagaaagctatgagccgtgtgtagggacacatgtggtggtggatttccacttatgtagtgctacccacccagggcttcatggtccttgtccccatgtttctttggccaactctgctctagcttccatgtcaaaggtctcaccctcactcggtccctcagtgttgcagctatagcttgtggcttctttcctggtaactgtggtgttggaaaatgacaccagggccatgtgctttcctgcctgataccttcttgatgactccacttctccatcagctatttcctctttctcaccgtggtggcccttctctgatctggaccagcattcctgggagaggaattcctgtgcacagccaggtccagggacatgaggacagttcaggatgagctcaggtgggagaaggggaccacccctgagagtccaccttccccagggcccctccacctatgtgagtggacatgagccatggggcagctgggtatgggcatctcagcccaccctttgagaaaaggctacagccaggagtgtagtttgtggacagcacccatctgccacatctcccatatctgctgcagtgtttacgctgagaccactctctccccaggcagctctgatacagtacaagagccaggccatttctgccaatgcaggccacctccaaggcaatcttgggatccctgtcagcctgctcaagactctctgggggctctagttcagagtgaggatctttctacccaactctacctcctcctcctttccttatagttgtcagatccccatgatgtcctgaagccctctctgctcacttgcgctacagacagccccccaggaagtctcctgcacatcgaattctgctgggcacagcttcctggaggaccccaagccacacgcacagtctcagaaactttgtgcacagagtgcccagcagctaggatcccctcctcacctaaaataaagggaccctcttttctctatttataactgagcttccagaagccagccctgtcctcaagcaatgttcagactcaggccaaatgctcttcctttttggctgctgcccttctccagggctaataaatgctctttctttagaaatgttaataaaatcattcaagtccctgttactttataaattgcaacaaatgtctctgtatatctgaaaaatagtgatgaaaatggcatcaaaccaggtcctgagcccattcacaggcacctgtagctttctggcacccacacagtagctctacaggccacaggcttgtcatcagtgggctgaaacactcctcagacatagaaaatacacccacgtgctaacaaacttggttgctggttgttttatacagcatgggtaaacatctctttgctaactgtactattcacaaatcctcattggtcattatcggcccacatcagattagaggctgcaccacaccagcagtgggtgtggggagagagaaaccactaagagcaggtgcaatcttaagaccccagcagagggtccctgctgcaggagtggccatctgcctgcttgccactgggggaatatgcagggaaggttgagagctggggaggatcatcctgagtcctggagaaaggcaaaaggcaggttcactttgcagaatcagatgccgggggcttgcctcaccaccttcattcattccggacattaacaagcatttgttcagggcctgatcataggccagatccctggggatgctgtgaacatccctgctccagggaagctgaatgttagcattatttccatcaaaaatggctaatgttgtccaacgtaatggcttctgttgtttggaaaatgtgctccagcagtgtgtgtctctcaaagatgcttgcagattagtgatactggcgtgctgagatggaaagtctgggaatggggcagtggctgaataaaagctctctgtttcctgcaaaggttattccacatcctcataaatccactactcggtgaggaccatcaggcaattcactcccggcatggggtgggcgagtcacacctgcatgttcactgtatattaagcaaatgaggttgttcttgactgcagtgtcattggatgatgatggaaacccatgcctggattcagatgtaaaaatatcaagaatatataaatacaagaaagccatcagtgatgtcagccaaagcttcactctcctaactcaatcctgcggaaccacagcagtgaggttagagcgtccactgctgagctgtcaccataaggcttcacggaagtggccagcagatggaaaggattcctcatgataaaaacacagaacaacctcagtgttcaataatcacagcaggtcacattcacagtgagacatccataggatgagatgccatgaagccactaaaatcatttctttttttttttttttgagacagagtcttgttctgtcgcccaggctggagtgcagtggcgtgatctcagctcactgtaagctccatctcctgggttcacgccattcttccgcctcagtctcccgagtagctggggctataggcatgcgccaccatgactggctaattttgtttttgtatttttagtagagacagggtttcaccgtgttagccaggatggtctcgatctcctgacctcgttatccgcctgcctcggctcccaaagtgctgggattacaggtgtgagccaccgcgcccggcctaaaatcatgtcttaaaagcacttaatgacacgagaaaatgtaaggtatgtaataatttatgaagtactttacttaaaaacaaagcagcaatatacaatatggcccagaatttgtgtatagacacacacacacacacacacacacacacacacacacacacagagagaaacagagaaagagaaaggaaaacaaaatctcacaaagaagagaaaaatagccactggttatctctaaatcacacatcttatttttattttattttcacatagtgtttaagagcacagactctggatgcagattcaggtttaaacccaacctcttctccccctgaaagctgtgtgacctcaggcaaaatacttaacctttgtgcctcagtttcctcatctataaaagaagataataatagtacctacctcacagggttgttgtgaagagtgtctagcactggataagcattctacatgggcatatcaaaatcagtcaatcaataaaactaagtttctatagttttcaaattttctgcaatacatatgctgtcgtagtaaaaaaaaaaaagtatttttaaaataaatgtttagagttgaagcctggatgaattataaaattcttcctttctcctctcattcccactcccactttgggcaatgacttggagttcctgatgtggggatggaaatcttatctgacttgggcaaatgagctgtgtccatgccactcccaaatcaagaagtcaaatgctgaccccatgtgtattatgccaccaagggacactgtctctaagaggcactgagtcgtgggctgtggctgggtggaaggaattggagaaggaagaggaggaaagaaagcattttgttttctggaatgaaatgatttttcttccttttttaaaaaaaggcaagttttgagaactcttatttgtacatcagaagggaaaaggagactttgggagtgaattcatttcttcaacaaatatgcattgagtgcctgctatgtgccgggttctgttttaaataaagggccatgatagtgaatgaaaaaggcacatgtccatggtagtgaataagacgggggagaaaaacaataaacaagtaaaaaggaaatgtgaaatatcatggcaaaagaaaagactgccgtattagtccattctcatgctgctactaaagacatccccaagactgggtaatttataaaggaaagaggtttaattgactcacagttcagcatagttggggaagcctcaggaaacgtacaattatggcagaagggaaagcaaacatgtccttcttcacatggtggcaggaagatatgtgagcaccaagtgaaaggggaagccccttataaaaccataagatcttgtgagaactcactcactatcacaagaagagcatggtggaaatagtcccctgatcgaataatctccgcctggtcccttccacgacatgttgggattatggaaactacaattcaagatgagatttgggcggggacacagccaaaccatatcaactaagaaggaaaataaagcaaggtaagaggatggaaaatggccagtgtgtccctttccagagggtggtcctcagagagccatcccaaggatgatgatatgtgggcagagaatgaaagaaggcagacactgtgccatgcaagtgtcagaagatgttcctgagagaagaaaaagagaaagaatctgagatgggtttgtgtgtgtccaaactaaataagaagagttggaggccggatgggtctgaagggcaggtcgttcaggaactggagattgagtggtctgcaaagaggtaaaagatgagaaaagaacgtgaggccaggaaaggggcattgggcaggaagcatggtgaagaggtgcccagcatggcacacattgattccagttggcctggccaaaaatgtagtcagctgcagtggagctgtgagatgattaattttaggtgaccacttggctgagttgagggatgcttagatggctggtgaagcatcgtttccgggtatgtctgtgagatgtttccagaggagactggtgtgtgagtcagtggactgaggagggagatccaccctccatgtgagtttgcagcatccaattggttgagggcgtgactgaaacaaaacgggcagaagaagcgggactgcgtgctgtctctgctttctctctccctgctggagcaagatgctttttctcctcctgcctttggatgtcagacaccaggttcttcagctcttggcctctgagacttgcaccacagcctcccagggcttttcagcctgattgagggctaccctaggggattcctggttgtgaggctttggattgggactgagccacatgaatggcttctctgcttctccagcctgcagtgggtctatcatgggattttgcctctgtgatcatgtgagccaattccccctaataaatccccttccatacatctcactgattcaatcagtaagattcaataagtaattcaatctctaatgcagattgtggtaccaaaagtgattctaaagaaacagaatttttggcacaagacagggatgccctctcgcaccacccctattcgacatagtgttggaagttctggccagggcaattaggcaggagaaggaaataaagggtattcaattaggaaaagaggaagtcaaattgtccctgtttgcagacgacatgattgtatatctagaaaaccccattgtctcagcccaaaatctccttaagctgataagcaacttcagcaaagtctcaggatacaaaatcaatgtacaaaaatcacaagcattcttatacaccaacaacagacaaacagagagccaaatcatgagtgaactcccattcacaattgcttcaaagagaataaaatacataggaatccaacttacaagggatgtgaaggacctcttcaaggagaactacaaaccactgctcaacgaaataaaagaggatacaaacaaatggaagaacattccatgctcatgggtaggaagaatcaatattgtgaaaatggccatactgcccaaggaaatttacagattcaatgccatccccataaagctaccaatgactttcttcacggaattggaaaaaactactttaaagttcatacggaaccaaaaaagagcccacatcgccaagtcaatcctaagccaaaagaacaaagctggaggcatcacactacctgacttcaaactatactataaggctacagtaaccaaaacagcatggtactggtaccaaaacagagatatagatcaatggaacagaacagagccctcagaaataaggccgcatatctacaactatctgatctttgacaaacctgagaaaaacaagcaatggggaaaggattccctatttaataaatggtgctgggaaaactggctagccatatgtagaaagctgaaactggatcccttccttacaccttatacaaaaatcaattcaagatggattaaagatttaaacgttcgacctaaacccataaaaaccctagaagaaaccctaggcattaccattcaggacgtaggcatgggcaaggacttcatgtctaaaacaccaaaagcaatggcaacaaaggacaaaattgacaaatgggatctaattaaactcaagagcttctgcacagcaaaagaaactaccatcagagtgaacaggcaacctacaacatgggagaaaattttcgcaacctactcatctgacaaagggctaatatccagaatctacaatgaactcaaacaaatttacaagaaaaaaacaaacaagcccatcaacaagtgggcgaaggacatgaacagacacttctcaaaagaagacatttatgcagccaaaaaaacacatgaaaaaatgctcatcatcactggccatcagagaaatgcaaatcaaaaccacaatgagatatcatctcacaccagttagaatggcaatcattaaaaagtcaggaaacaacaggtgctggagaggatgtggagaaataggaacacttttacactgttggtgggactgtaaactagttcaaccattgtggaagtcagtgtggcgattcctcagggatctagaactagaaataccatttgacccagccatcccattactgggtatatacccaaaggattataaatcatgctgctataaagacacatgcacatgtatgtttattgcgccactattcacaatagcaaagacttggaaccaacccaaatgtccaacaatgatagactggattaagaaaatgtggcacatatacaccatggaatactatgcagccataaaaaatgatgagttcatgtcctttgtagggacatggatgaaattggaaatcatcattctcagtaaactatcgcaagaacaaaaaaccaaacactgcatattctcactcataggtgggaattgaacaatgagatcacatggacacaggaaggggaacatcacactctggggactgtagtggggtggggggaggggggagggatagcactgggagatatacctaatgctatatgacgagttagtgggtgcagcgcaccagcatggcacatgtatacatatgtaactaacctgcacaatgtgcacatgtaccctaaaacttaaagtataataataaaaaaaaagaaacagaattttaagaatgaattttcttaattggttttggagtttctcaactttgctctctaatctgactagacctaaaaatgcgaaagattgtaccaatagttcagatagcactgatagtccatggcatgaactgttaatagagatacacaaaacaaataattttaatactcctaattcaccaccttatgaagcaaagaactcattgactctgtagatgacacttttgagcatttgtgggaaaccacacaatataatgacatcaattggttgctcctaacatcactggacaaagtgatgaaagaaggatgagctcagagattccaactctctgctccagatgtacataaatagcccaaaagcttccaaatgtgccctgaaggagaatctcctcttctgtagccacagggttaacattgctgaaaatcaaacacaagccctcatcctgagattggctgacttacaatgaaaagtgaactcttagtcttgccaggggtctactattaaaatcatggcattgattgggaaagaataggaccctgtgagctgggatggggccatgtgggaagaccctgataaagctcgggacactgatctcctaaattctgatgaatcttgttttcccgggaaagtggcctcttcaccctcaatggcagtggcatcctgggggatgtaggcctctccacctgtttgagaggcaaaaccctgcattgcctgaggaaatggtcatggcctcccctcaggcaagacaatgctgattctcctcgagacccagccccaccatccctctgcttccagacctttaactatgctgaagtcccagctggaccctaaaggtcagatacacagggtgacacatgggaggtgtggtacagtcaaaaacattatttgaattttctaatttatgcaagcagaaatctggaaaacacatgtgggaatgcatattaagaatgttggaaaatgatggaaggaacataaagttggatcgggaaagttgtgttaataggggctcattaagcagggattctgcatttaatgttgcagctcagggagtttaaacaggcaataattgtttggttggttggctgaaacatggaccaaaagatggtgtgccctgaatgagttggagacgtctgatctcccttgggctaatatagaggcagggactcaaaggcttaggcagactggaatcctagagtgggtttgtcacttaaaacccactcacccacactggtggatccagaaaacagatgtttcaccaactccttgagaaacaggtttgtatggaagtcccagcatccctgaagagctctatgattgctgttccctgtatgccagatcctaccgtgggaaccacgattactcaattggaaaacttaaatgcaatggggataattggatcctggggtggcagaggtcaagtggcagcactcaatccccaaaggcaaggagggtgcagttactgtaatggacagcagaggcaattcagcaatcagaggtctgactcatgttggcctatgacattggagttaatcatggtgttcctagaaatgaaataaatgggaagtctactacattcttacttggtctgtataagcagaaaactttcagggcaggtgaataaaagtctaactcaaatcataaaaacagaatcatgagccctcaaccaatttctggacttgagccagtttatagatgcagagccccttgcgtgaaagggagaccaggtctccctgaagaaggacactggtacactactgaaaatgtataccgttaaagtttctctgatgcttccccaaagggacctctggcatttagccagaatgactgtgcattgtgggaaaggaaataatcagatttttcaaggacctactggacactgcctctgaacctaaaacatcactggggccattcaattagggtagggtttattgagatcaagtcattaatggagttttggctcagttctgacttacggtatgtccaggaggtctccagacccacatgtggtcatttcccccatgctggatgcataattagaatagatgcacacttagcagatggcagaatccctacattggttacctgacctgtggaatcagggcttctatggcaggaaaggccaaatggaagctgttagagctccctctacctaggaaaatagtaaatcaaaaacaatattgcacccctgaaggtgttacagagattagtgctaccattaaggacttgaaagatgcaggggtggtcatttccatcaaatccccattcaactcttctgcttggcctgtgcagaagacagatggattttggagaatgacagtggactttcataagcttaaccaggtggtgactccaattgcagctgctgtaccaaatgtagtttcattgcttgagaaaatcaacacatctccttgtacatggtatgcagctattgatctggcaaatgcctttgttgcctcatccctgtccataaggctcacaggaggcagttttctttcagctggcagggccagcaatacaccttcactgtcctacctcaagggcctatcgtctctctagtcctatgtcacaagtttgtttgcagggaacttgattgcctttccttccacaagatgtcatactggtgtgttacattgatgactttatgctgattggacctagtgagcaagaagtagaaattgttctggaattattggtaagacatttgcatgtcagagggtgagagtgaaatccatttaagattcaggggccttctaccttagtgaaattttcaagggtccagtggtattgggcctgttgaaacatcccttctaatgtgaaggataagttgctgcatctggcccctcctacaaccaaaacagaaggacaacacctagtgggtcaatttggattttggagggaagatggttgggtgtttctccagttcattcataaagtgatccagaaaaagctgttagttttgagtggggctcagaaaagaaggctctgcaacaggcccaggctgttgttcaagctgccctgccacctggaccatatgacccagcagatccaatggtgctggaggtgtcagtggcagagaggaaaacagtgtggagcttcaggcattccctataggtgaattgcagtggaggcctctcggattttggaggaaggctctgccatcctccacagataaccattctctttttgagacagctcttggcctgcaactgggccttgatagaaactaaacactttaccatgggctaccaggttaccatgtgacctggggtccccatcacagactgggtcataaagttgggcatgcacatgacccaccacgccgtaaagttgggcatgcacaggagctgtccatcatcagacaggagtggtctgtacgtgactgggcccaagcaggccctgaaaacatgagtaagttacacgaagaagtgaccccaatggccatggtccccactcctgctatactgccttctctcttccagcctgcaccgtggcctcatgggaagttccctatgatcaggtgacagaggaagggaagactcgggcttggtttacagatggttctgcaccatgtgtgggcaccatccagaagtgcacacttgcagcaccacgaccccttgctgggacaccccggaaggatggtggtgaatggaaatcttcccagtgggaaattatggttaccagctgcttggaaaggagcaggtggggagaagggatcaagagaagttggttgaggggtacaaaaatacaggtagacagaaggaataagctctaaagttcaatagcagagtaggatgactatagctaataataatgtactgtgtacttcaaaatacctagaaaagaagatttgtaatgatcctaacacaaaaaatgatatatgtttgaggtgattgatatcccgatttccctgatttaatcatctcacattgtatacaggtatcaaaatattacatgcacctctaaaatatgtacaatctttatataccaatgaaaataattaattaacaattaaatgaaaaaggatatcaaaatgtatgaatgctatgcttgcgaatatgaaaataattatacaaatatggtaacagagaaaggtgatgacattaaaattaatttttaaacttaaaaaaagacaaactcagggtttgaggtttaataaaattatttcagattatttcatcaagaagaattcaatgactactattaagtttgaatccatggccttcatttatcctgaagcaccagaagttttacctaccgtgatggttaattttatgtcaacttgagtacactatggtgctcaattgtttgatcaaatactgatctagatgtttctgtgtgggtacttttaaaatgagattaggatggatgtgattacaggctcaagcctgtaatcccagcattttgggaggccaaggcgagtggatcacctgaggtcaggaattagagacctgcctggccaacatagtgaaaccccatctctactaaaaatacaaaaaattagccaggcacgatggtgggtgcctgtaatcccagctactccaaaggctgaggcaggagaatcacttgaacccaggaggcggaggttgcagtgagccgaagttgcaccattgaactccagcctgggcaacaagagcgaaactccatctcacacacacacacacacacacacaaaagatgcgattaacatttaaatccatagattttgagtaaagcagattattcttcataatgtgggtgggtcttatccaatcagttgaaggtcttaaaagaaaaaactaagctctctggaggaagaggaaattcagcctgcagaccgcctttgggctccagactaaaacatcaacttttccctgagtctctaacctgatggtataccctgcagatttcagatttgttaattcccacaagtacatagctgattccttaaaattatctatctatctatctatctatctatctatctatctatctatcatgtatatatgtattatcccactcttctgtatctccatcctattatttctctctggaggactctgactaatacacttagcatcacttttgcattattagtgcaaatgtctacacagtgcaaaaaaaaaaaaaaaaggcaaatagcaccttagtattatattaagaaaatctttttgattatatgatataagtgcttttgacctcatggcccacagaaagggtctcagagattccacagcctacacgtggaaaatctctgccctaacccgtttttctctcctgacatctctgcagtctcaaaccttcataacagacaaataattggactctgtaccaaacctgattaaagaagagcttagagtctctgagaagaagacaacaggaccatcctggagggccctccgagtgctttgattcctgggaaaagcaattccctgagccttgctgtgctacacaaccaagatggccttcctgacatcatttccccaagtgcccttgattcaaaaggtttttttttttgatgattctatttgacacaaagtcctaagagttcctgttcctgcgcttcgagagtagccgtcacgcatattttatctctataaattatgagaaattgagccatcatggggtgggaacaaaacaggacatgttctttatttccccttttgtcccctcgaggcgcagcgtgggcggatagaacttgggagaggcaagaaggtactcctgttggctgagagctcaggaagttttggaccaaagccaggccacctcaagaaaaaggagaaagggaaagaaaattccacagttggtggtagaactgtctctttgcctgggggaactttagcattcaagttattaaataaagcagcccatctggcagttggctatgagaagcaattcataccattgtaaatggattagtgaaatgtaattcctttcacatttcagtttcaattattccaaatgggtgcacgattcttaatgttcaggaattgttttgaatgtctgcagaaatgcaaaaagtaaatatgtttcctgttagggggctccaaagaatgtttcccattctcgttcttgccgtctttgccttagtccacctttttagcgccaggtcaatcagcagccttatttaggtacgaagaagggaattcatttgtgttcactgagaagacttgaaatgccccggggaagacctgaggaggggctgttgtggtccttacccaacgctctcaaatggtgattctgacaggagcctggagctggcagggtgagagttcctacccctggagcctggctctgttgaattcctagaagaagagtaattaacatgggctgcagcaatggcttgggagggtgtttgcatctacctgaactctgcaattacatggcacagcctggtgtggaatccaaagagcagccctcgggatgatcatgaacttgggtgctacctcaagttgggagcagctgagccctgctcatcacccaagggtgggatcacctcagggccaccctgcacacacaatgggctgtttttgctggtcggtattgatgccctttatacatgtggtactgagctcagtgaccacccaggtggtcagcacttgttgccccttttataccaggaagctatgaatggctgcagagagacaggctgtaaaagtcaagtccaaatacagaaattctatggattgtagctgcagaaaaaaaaaaaaaatccctttcaaatgtggtactagggagtgggggaggaatgttgttttcccctgggaaatcacgactccacgaatttcattcacagaggtgataggaaaatataaaagctgggccaagtggacaaaaaaaaaggcaacaagaagtacagcctgtttgatcacaaagtcaaggaggagcagcttcaggcacagggttgggggcggggggcttccccgcgtgaagccaaggaatgcaacgtggatctcacagagaaggacccaggcaggggcaggggaaaggacagctgtggaggaagtgaccaggcccaaagcaagtgacggtgcaggacacgtgcaaattccacagccactggatgctagcacaaataagtgtgagaaacacactcccggctggggtgtgagtgcctgagaaccacaaacgtacctccgtcctgcctgcattcatgtatccctattgcattcaagttgccagtactcaccaccaaatacatctacaatgcccaatttaaaccaatgtactggaaatgtcattgagtgccaggggttacacagaacctgcagcccaaacctctccaggctcctcaaggaaatatctggctccaaactttcttttaattactgaaaatcccagatgctccacatatagagagattaacagatgctccaggggacaaggtctatgaacatgcaattaccctacaaattcatagtattagttcttggtttaaacagatttccttcttttacccagttgaaaagcatctctggaagtcagaagtagtaactaggtgttttccctccatttcatctctgcccccaaataaagaaaaaaaaaaagtctctctgacttattttctagctccaggtcaaaggacaaaatggaaagaacattttgaggctgtattttctcatttagaaccttcttaccacttctcgaatgagcatcacgttgcataagaaaagggtttcccccacccctcacctgtgttcacaggtagggccgactctttctttcctgcacctggggtcacacagaagattctcaagtggggcttcttctacttgcatttcagagctagacagggctggaagaatggtgatacacgcctgaccaattttattgtcatctgtcaaagagcccactagccctgtaagagggagacaggtgatgggaataaagaagctagagtttcagggctgccatcacggtctggggtttcattgcaatattctgtgattttatgggaatgcaaataatggatacgaaggaagacagagaatgagagacctgcagaggtaagagtaactcacctgaagtcgaaaagaggccaaggcccaggctatttcatgatttcttatcaacttttatttttatattccaatcacagctgccagtgggattaattttaagtgtatatttaactcctaacagagtggagcttgccacagtctctaccataatgagacaattgtaaattactcatacaggaataaaaatgatccagttaaacgatgtagattagctgtctaaactgtccaaactcgctttctttcctcctttgaggactttcctccttagactcctatatagtgagtctctgtgtgtgtgcaccagtgtgtgtgtgcacaagcatgtatatttctgtgtttgtgtgagtgcttctctgagcagtaattccacccaaggagtctgcactgtgctaaaaccagtgggtgctttaaaaaaaaaaaaagagagagagagatgggtgtttcagggatctctgaaatttttttcatggtattaagaaatacaaatattcctcaaaactgaaaaaaaaatttagaataaatctattatctgatagggtaggagagggaatttgctgagtcaagtgtgattaaagctgaaccatcagatttacatcctatacaaattgtcaacttccagaaaggtcacatgaagatttttccaacagagcaactacattggagttcagctggaattgcactaaatctaaattttccacaatgttctagagaaaaaaatgtaaactcctgtttgttttttcctgctcttactgaactcatggtctcagccctgcttggatctgggggccgtttaaatgtctgatagaatctatggactttcttccccaacagacccaatttagatacagatttcaagagtttatgaatcctttgaaccagatacattgaccatttagaaagttaagaactctagactcattctttaaacaaatatgtaccaagcattgactatgtgcgagtccattactaggtaccaagtacacagagatctcagaaaaagtggtctctgttctcaggaaggagaacaagggcaatatgcagataagcaaatagtatctaataatataagcagcagataagcaaataataaataagatagctgctaatcataatgaattctaggaagaaagtaatctggagtggctcacactgccccaggaacatgattataagatcacatttctctaaattttatgtgtaatagagttttgtgggtagaaaacagcttttaaatactagaattgactccacagtatcatattattattctagatcaagagactcttaggatcctgagtctcccacaagggaagggatctcccatttagtttctctccattactcacagataatcccaccttcttgaactctttccagaaagaaccaaaaggatgcaacttcacagggcaccctgctccatttgaacactcccagttgttagatcgatgtcttttacttataacaacttgaaatttgactttttataacttccaaacaagtatattatgattatttctaaattatcaaataaaggatgagtctcacccatccttttgtagatccttccataggctcttttttctaggttagacattcagtttccatagtaattcctgaataattaactcaccatacttctcattccaatcttttaaagccctggagctgaactgaataatgcagaatattccatagcaatcaccatctttggcataaagcattttatttatattaagcctcagattgcttttattttcttacttaattcagtaccccactgatgctattgagcttcccagtaattaaaaccacctcagcgtttctgttaactattcttaatccaagtcgtctcctttctactgttttttttttttaatctagcttcttgaattgaatgcttaactaatttacttgtcttctttaaatatttaagtatttattatacaagactattatttagtaagactaaatattacatataattttatttgttcaaattaaataaaaccatttaaggctataaatgtaccaggaagtgctgctttggcagcatcccaccagtttcttaagcagagtttcactgttgttctaactacttcttaatctgcactgcaaattttctgctaactaaagaggtatttagtaaaagcataatgtgcatttgctgtattatctgagaatattaaattctgctataaagacaaggacaaaaacaggatggatgacaccccatgtgtattagtcttctcacgctactaataaagacatatccaagacggggtaatttataaaggaaagaggtttaatggactcacagttccacatggctggggaggcctcacaatcatggtgaaaggcaaggaggagcaatgtcatgtcttacatggtggcaggcaagagcacgcgtgcaggggaactcccctttataaaaccatcatatctcatgagacttatctactattatgagaacagcatgggaaagacctggtcccatgattcaattccctcccactgggtccctcctatgacacataggaattatgggagctgcaattcaagatgagatttgggtagggagagagtcaaaccatatcattcttcccctggcccatcccaaatctcatgttttcacatttcaaaaccaatcacgccttcccaacagtctcccaaagtcttaactaattccagcattaactcgaaagtccacagtccaaagtctcatctgagacaaggcaagtcccttctgcctctgagcctgtaaaatcaaaagcaagttagttacttcctagatgcaatggggatacagacattgaataaatacacccattccaaatgggagaaattgtccaaaacaaaagggctacaggccccatgtaagtccaaaatccagcagggcagtcaaatcttaaagttccaaaatgatctcctttgactccacgtctcacatccagatcatgctgatgcaagaggtgggctcccaaggtcttgggcagctctgtccctatggctttgcagggtacagtcccccagatggctagcattgagtgtctgtgggttttctagtatatggtgcaagctgtcaatggtcagatctaccattctggggtctggaggacagtggccctcttctcacagctccactaggcaatgccctggtagggactctgtgtgggggctctgatcccacatttcccttctgcattgccctaacagaggttcccataagggatccacccctgcagcaaacttttgcctgggcagccaggcattcccatgcattctctggaatctgggtggaggttctcaaacctcaattcttggcttctgtgcacctgcaggctcaacacaacatgaaagctgctgagggttggggctttcaccctccaaaatcacagcccaagctgtaccttggccccttatagccatggctggagcagcttgtatgcagggcaccaagaccctagactgcacatagcaggggcccctgggccctgccaggaaaccatttttccctcctaggcctccaggactgtgatggaaggggctgccatgaaggtctctgacatgtcctggagacattttccctattgtcttggtgattaacatttggctcctccttacttatgcaaattcctacagctggtttgaatttctccccagaaaatggggtttgcttttctatcacatcatcaggctgaaaattttccaaacttttatcctcttcttcctattgaattctttgacacttagaaagttcttccccagataccctgaaacatctctctcaagttcaaagttccacagatctctagggcaggggcaaaatgccaccagtctctttgcatagcaagcatgacctttactccagttcccaacaaattcctcatctctatctgagaccacctcagactggactttattgtccatatcactatcagcattttggtcaaagctattcaacaagtctctaggaatttccaaactttcccgcatcttcctaccttctgagccctccaagactctaggaagttccaaagttttccacattttcctgtcttcctctgagctctccaaactgttccaacatctgcctgttactcagtcccaaagttgcttccacatttttgcatatctatacagcagcaccccactcccagtaccaatttattgtattagcctgttctccagctactaataaagtcatacccaagactgggtaatttgcaaaggaaagaggtttaatggctggggaggcctcacaatcatggtggaaggcaaggaggagcaaagtcacatcttacatggtggcagccaagagcacgtgtgcagggaacccctttataaaaccatcagatcttgtgagacttatttactatcatgacaacagcatgggaaagacctggccccatgattcaattacctcccactggatcccttccacaacacatgggaattgtgggaacgataattcaacatgagatttgggtgaggacacagctaaaccatatcttcatagaagagatggaaagtctgggcttagacaagttgcttccctgggatcacaaagctggtgagcagttcaacaggattagactctaaatctcctttgaccttttctcttcactatgatgggaatggaaagtatcatcagaaatgatagaaagtgtctataaaaggaacactggcacggggcttgggacactcactgcctgtgtctgctcatccctcaatgagttaaatcaccttaagtgagtcatctgatctctctgaatccacctgctcttacgtatagagagcaaagtagttggacctaggtgatggctaaggcccttttcagcattgacatttttggtatctcccaaaatacaaattggcaaatttcattgggatttgcttttagaagtggcttctgttagtcagtccccccacagatggtcaagtccatgctgcactgcacaaggctttgatataaaggagcacaaatttcctgtcatttatgtaaaatacatcttcttggcttggaaatcaaagagattttttaactgccaattctaccctgtccatttgggaactgatgagtatttgaaatgttcccatcatttagggaatttcctggcctctcctagtgctcagtgtggggggctagccctgcactcctgcatcctgaggtgtcaagagagaggacacctggattctgtcctaagtggagagaattggaggacggggatgggggggtagataatcatagaaagataatttcaatattcagcttttcacttgctttctctgtttcatgcttcatgcttccttagtatgagacaagtaagcattggctaggtgaagaggtagggagggagtttttctgttggatgaaagctttgtgggacgagcagcagcatagttaggcttcagaaatgtgtgtagtatagtacttgaggtagtgcatgtaaggcaatatatacgttgcatgacaagaatagaaacaagctgggtccagccctgcagggccaggtcagcagcatgagaagccagtctgtgctgaaggcaattggaggcacggagaggtttcaagcaggagagtcatatgactagattcccattcatgaaagagctctgtgactgctataagcattttacagtagccagtctgacagcctgggcattgtttaggagatagttgcagcaattttagtgagagatagtgcaattatgcagagttagggatattgcaggagtgagaataagttgttgaggttgactttagagctctggtttgggagctagggcagtagtgaggccattcattgctatcacagaggactcaaaaatagagaagtgaataactgagttttggagaagttgagttacagatggggtgcggcagctaagtgacactatttggcagagtggagcaccttcagcagatagaaggaaagatggtggctgatagcagagggagcagatgagagtaatgggaacacaatgtagatttcagtgggtggtggaatagatgcaaggtatagagtggggacagcaagtgtagacaagttggcttctaaaaggaggagagacagagggacacatggggttgggaaagttgctgttttgtttgtgtttttgttaataaaggagattggggttggtttaaatgctcacggcagtgtaacagtagagaaaatgaccctcacgtcattactcagctaatgtaacagcctagcaccaaacacatgtctaagcatggcatttgggacttttcataaatcagcctactatgggcagaattatgtccccaagaaacatatgtccaagtcctaacccctggtacctgtgaacataaattcacaggctacataaggcaatttaactggaaatagggtctttgccgatgtaatcaagatgaggtcagagtagatttgggttgagtctaagtggagtcctaagtggagagaattggagggtgggtgaatggataatcatataaagataattgcaatacccagctcttcactgtctttctctgcttaatgcttttttagcatgagacaagtaagcattggctaggtgaagatgtaaggagggtgtttttctgttggacaaaggtgtcctaaatccaaagagtcctaaatccaacaactggtgttcttacaagagggaaatttggacaataagatacacacaggaagtaggccatggatgacagaggcagggatttgggtgaagcttccacaagccagggacaccaaggataactggccacccccagaaactggaagagttttcagagacagcatggccctacggctcatgaatatgggacttcaatgacttctagagactcccagcttctacaactgcaaaagagtggatttctgtttgtttgggttttgttgttgttgttgtttgtttttgtgttttgttttgttttgttttgagacagagtcttgctctgtcacccaggctggagtgcagtggcatgatcttggctcactgcaagctccgcctcccaggttcacgccattctcctgcctcagcctcccaagtagctgggactacaggtgcctgccaccacgcctggctaattttttgtatttttagtagagacagggtttcaccgtgttagccaggatggtctcgatctcctgacctcgtgatccacctgcctcagcctcccaaagttctaggattggatttctgttgttttaagccagctggtgtacattagttttttccagaggccctaggacactctgtcccacccctcccgagtgtgtgaacctggccccgcagccacacctggcacttttcatccccagcggctccctccagggtcctgcctccatgtctactgatttcttcccacctcctgagatgtcctttccccacctttttgccttgaaattctttccgtccttccaaaccaaatctatgttaggcttaacgtctctctagagaacccatctgtagctcccatggtatcctgctgatgggcacctgtcacccttacctcatcatgtttcgcacaacactgctctgatgtgtcctcagccacactgttaacctctgagaagaaggctaagccatttttatctctgcctccccactgctgctgaaatggtggatctttcggggcctagccaggaaaacaaaatccccatcagataatttaatagaggaaatataactgggagaattaaatgcaaaagtatttaaagaattaaaagcacacacagcggaaagggaggcaacccagagattagcagcacaaggagactggagaaacaaatggagaggacaaggggaggaatggaactaccagcaggaggggaaaccacagagaacatgcatctggggccagaggctccatccagcacagagggaagctgaggaaagtcccagcttctcctttcccctgacttccccaatccaacccaaaaccagcagatgggggctgcaggcctggttatggggccagccccactgtgttaaggagcagagcataaaacagcccagaaatagatccaagggcaagcaagtggaccgcacagatggcaaaggctgggatttctcaggcaaatgagtcaatttttagcaaatagctaaaaatgctgtaacacggttgccgtcataagagccagacagcaaagaggatgctgtagacacatggtggagcatttggtgaggccctgtagttggtggaataatcccccccagcaaatgccttcaccccaatcccctgtggatatgtcacgttatatagtgaaaaggactgcctgatgtgactgaattaaggatctgctgttggcgagatgatctctgattatgcagggaagccccatggaatcaccagggtctttacaaaacagatgccagaggtcggtaggagatgtggccagagaagcagcgctcagagtgatgcaaagggggcctaagcccaggaatgcaggcagtagtctccaggagccgaaaaaggcaaggcagcaggttcccccagagctccagaaggaaccacgcctgccaactccttgatctcagccccctaagattcattttagacttccgatctccaaaaactacgggagaataaacttgtattgttttaagccacaaagtttgtggtgatttgtggcagcagcaacaagaaactagttagtacgcatccttcatgaggagtcagacttaaggagagaggggtgtccagatttagtgtgaaccaagggcttaccgtcctggtgaaggtggtaggtgctcaggtgagagaaaaaacagaaaggaaaaaggaaggagaggaaaggccaggaaggagacttacttacctgctggtcatgtgcatcccagaggtagaaaggattgggtgggcaattgcgaggctacactaaggagccttcaaactcctagctgaagaatgtctattttacgtggctgttagagaaatattaaactcagtagaaatctggccatgcataaagatccaaccgccactgcctggaatggagtaattgcccagcgacgctggtatttgtggttaatctgaattatttcggcaaagtgatcctgtttttgttttgtagattttttgttttatttcttcctgacctgtattgttcaacacttgctttgattttccactagaagacctaatgcaaatctggatttttcttttctttcttttttcttttttttttttttttttttttttactaatataaggtaatttcagtcaaaaaccactaaacgctgataaaaactctaggtgaactctgtatcttttgattccttttagcctaatggccactgattactgtgctgatctaggaagctgcttattcgttttaccaccaggcagccagcatggaattccattgcattggtgtgctttgtttaactttttaaaactcctgatgtgaagtctcctgaaactaaccttattttgtctaaaattacagttaaatccacttaatccacatggttctgtaaaaccattgtctgtaagttattttgatttttttaagtgcatttgctttattttgaaagctcaggtctaaccaaatatttctctaagagttcaatttggaatcaaggctaacagagctgactggaggatcattttcacatcacaaccttctgagtcctgggaacacacaatgtcaccattgtcaacattgactggtgcattcgtgatggacaacaggttggttcattactgcaaacaggccccaattagtttgctaaatgtgttgttatacctgcatatgtttttttttaaatgtctctctccaaccactcatttcaccctttcaaaatgtaaaagattttataacaggttcccaaggtcactgatgggcacagtgtacctaagtttcctatccctctttttaaatttttcttgtctcctacaaccattttatatcagtgatttaaagtatgttggcattgaaattggttagcaagttgatctttaaatatattaaatcagcttgacatcttatgattatagtaactattatcactattgctttagaaacatataagtgaattcagattttaacaatacactttgtgataaatacaaaattaaatgagactatctactgaaatgggcgaagagaactagaaagtactaaattacagagtccatggccaaaagcacaagatggcatattttccatcaaccaactcagttgagcttggcacatagtaggaactcaagaaatacttgtgtaatgaataaattaatgaatgaaaatgaattaaataaaaattaattgcgatgtggaagaaataatttatccatgacataaaattgtagctcatactcttcttggcaatatttgtgcttatggagaaaaaaataaaataaaataagtaatcctcaataaattgtgaaacattccagctccagatatgacatgttatgacctttccattgcttttaacttgagcacattatctgtggtgcagctgaagcgctctgagatcagctttcctttctgccaagcgagtcacagtcattggcaacaggcaggagctctcagatctgccatgaacaagattaactgaagtacagttccaaaagagaactggagaccaccaaacatacatgttttttagaagaaagcagagaagtgggggaaatcttggaaaatctgtttttacatctgaagagaaattaacaggagtagcatgacaaggactgctgagatgcacagaggtaaataagagcatcagggtttcctcatattagctaaagctttatgatccaaattctctaggaactgggctccactttttgactcctttggttttttgtttggttggttggttggttttggagtttgtttgtttgtttccttgagatggagtttcgctcttgttgcctaggctggagtgcaatggcgtgatctcagctcactgcaacctccgctgtgctgtccagtggcctccgctcctcccctgccacctgcttccatgagctcataacattccaatggcaaatcagtgattccggaagaggaaaccaagcctcagtgcctgggaggcgcctttgtctatccaggagtggctcaactcaaattccttaagaaattgggtgtccatggagactaggttaactcctaattccaggtggcagtttctcaaggaagttactcagcctttctcatttcggggaattcacgtaacatgttgtgtctttggttttccttctgatgcgtgcagttctgaacagtgcgtccttgagggaattgtcatgcctagctcagacccattttcacagttttctgctagctctgctgagtgactcacgaacctccatggctcacctgggtcacctcgggcaactgctcctctgtccaacagcacagttttgctgcctctaggctgatggtcactctgagggaaatggggcaggaaagtacctgaattcagaaccacaggtggtccccggtgaactttcaccctaggagagtttgacattcaaagtagaatataagctccatgacagccaagtgcctaggacagccaggtatacagtagaaactttaaaaatatatatatgtatacatgtctaaatatatacatatttttataatatatcaatatgtttttaaatataattatatatataatttttgtaacttttcttttaatttcaggggtacacatgcaggtttgttacataggtaaacttgtctcattggggtttgttttacaaattacttcatcacccaggtattattatcacccagcctattattacccattagttatttttcctgattgtctccctcttcccaacctccaccctctaccctcctctgccccagtgtgtgttgttcccctctgtgtgtccatgtgttctcatcatttagctcccacttataagtgaggacatcgtatttggttttctgttcctgtattagtttgctaaggataatggcctccagctccatccatctccctgcaaaggacataatctcattattttttatggctgcatggtgcatatgtatatggtatacacatagacacatacacatatatacatatatacacatatatatttatatggcatacatatatacatatttacacatatacatatgtgtatacatatacgtatgtgtagatatgtatatggtatacatatatgtgtagatatgtatgtatatggctcatgataaatatgtaccatattttcctcacccagtctgtcactgaaaaaaaaatgtatttactaaagtttcctttaaaggtgagctctctcttgcatctctttgttacttctttctctctttctctctccttctccctctaccccctggcacctaaccatcccactctccaccctacacatggtacattcatttcctcaggctgttttaacagcttatcattaccttggtcttacaacaagagctatttattccctcacagttctagaggccagaagtctgaagtcaggggttggcagggctggttctttctggagtcactgagggatgatcaatgccctccttttctcataccttccagttgctgccggaagcccttggtgttccttggttggaagatgcttcactctaacctctgcctcggccctcacatattcttctcccccatctgtctgttttctccccttctcttgtctttcatttaagggcccccttaagccaggatgatctcatctggatattcttaattacatctgcaaagaccctttttccaaataaggtcacattttcaggttccattactatgatcttttgggggccacaatttaacccacaatacttggtatctatcatatataaagcagtacgatagttctgatttttctctgcaaactcccccaaattcctcctaatactgcttgcactatttccgtctcttcttttccacttccccaactaattcattgtcctgtcccgtgtgaattgatccacagtatctgggctcttggccattgactctctctcagccagccaaaaggaagtttcttaacaggcataggaagggaaaggctgcaaaaataaaattctctgtcaatggtaatttttcccacataaaccaataagtaagcaattcagaataccttttcgaatactgatgacaataaatgtctgcactccagcctaattgatgcagtattttccatggtcatctgtcgcaaaagctggaacctctgcacacttgaatgtcagcatctcaggaattaacacctttaggatgacctaagggctctaatttgaaagccttcttagattattgaaatgcagtaatgaatgtccaacttgctatcatctcttgaggaataaatgatggacttttatgttgttttgtggccaagtgcaaatttcagcacaattgcactagaaaataacacaatcaaacctttggagggtctgtgtgtgtgtgtgtgtgcatgtgtgtgcgtacgtatgcgtgtagatatctatttaaatgtatacatgcatacatatgcaatttattactagtttgttgaaataccaaaattttttcccatatttttcctttatttggttcatattctattaattaatctttccattattttcttctccaatgtttttcactctcaaagaatttctgattaagggtcaaagtaaaaaatacaggctccctttaaaatattgcttataacaatgatatctatcactcaactcctatcaagataggaggcaagatactggggggaagtaccttctcttttgtaaatttttttctcattgtcctgttaaatttcttgctcccttaatttccccattaaatttttattgctttattctttcttatagcagtttcctcatattaggtgcctctcaattttttttgtctattatgacatgctgtgtttgaatgaatggctctattgtgactcatttcagatttgagcatatctattcaagggccaaccatgaataaatctatttcatgtctatttaatttacatatgggatattttatcatttctttgacaaatggttctcaaagtggaattgtgagtgatattttgtaatgttcttttcgattatttgaaataatccagagttgtggaaaacaaatagcaaatgtactataggggtttatggttacattggtgtccaaattctgtaaccacaagggtaaagagaatcaaatgaattccttccctattattttcttaaaatcagattcctagagatcaagttcacttataacaaatgaacgttggttgttattagtttgtctgcacactgctataaagaactacctgagactgggtaatttataaaggaaagaagtttaattgactcacagttccacatggctggggaagcctcaggaaacttacaatcatggtggaaggtgaaggggaagcagacaccttcttcacaaggcagcaggaaacagagggagcacaggggaaactgtcacttttaaaaccatcagatctcatgagaactccctcactgtcatgagaacagcatgggggagtccgcccctgtgatccaatcacctcccaccaggcttccccgtcgatgagatttggttgggatcacagaggcagaccattccaccagtgttctggttttactcattgatatacgaattaaaatgctacaaaagaaaaggaaacattctaaatgtaaaatcataattttacaagataatagcacgttaggatgagggatctgcgaaagaacccctgtggcagttccagaggactgtgaggttctttggtgttccttggttggaaggaggcttttattctaacataagcacttccagtggggaccaaaaggaacagagtaaggatgaaataacagggggcattttggactccccaaattctactggcaggaagcaggttgataaaactcttcaactgaaaaggggatgatgactcagggcaaaactgagagcccagagggcagagctgagagccatgggggacccatcccaggccttggagcctaatacagtttgcctggatggacttcaaacttgctttgggctggtgacttctttttactttccattttctgccacttccagtggaaatgtctatagctgttaagctatgcctgttctttcactatatattgggggcaggtaccttctctttttagtgtcacggatccatggagggggaataattgtgcccaagacctggacttaatggtttacacatctgtacctgatttagatgacaggatttggtgtgcttaaaaaaacatttttttgagacagggtcttactgtgttgcccaggctggagtgtagtgacatggtcatggctcactgcagcatcaaactgctgagctcaaatagtcctcccatctcagcctcccgaatagctaggactacacgtgtgtgccaccatgtctggctaatttttctacttttgttgacctgtcttcatgggattctcctgccttggcctctcaaagttctgggattacgtacatgagccaccatacctggcctctgatttggtatacttttgaactgatgagattttgatgaaattttgcactctgagttgatgctgtaatgggatgaggtatgttttgaggatgttaggaagtatgagagatggacctggatcacatagacctgagggaagactgtgggagacagaatattggccccaatcacttagaccactggtgttatgcccaggaatgttacattccatggcaaaggagacctttcagatgtaattaagattactaataaatgaccttaagatggaaggattatactggattatcctggtggcctcaatgtgttcaccagagccctcaaaagtaacagaagaggaaagcaaaagagaaagtcagatttgaagtgtgagaagtacctgatggccattgctaactttgacggtggggagggcatgagccaaagaatgtagaggcttccagagagtgagagtgaccctggccaatggtcagaaggaaaacagggacttccatcctatggccgcatggaactaaactcttctaacacctgagtgaacctggagggaaattcttccctacagcctccaaataagagcccaggctggacagtatcttgattttggccttgtgaggccccgagcagagagtccagccatgccatgctgggcttgggaatctactgatatacagaaccgggagataataaatttatgcagtaagtgattaagtcggtggtaatttgttacagcagcaatagaaaactaaaataccgtctcagccatcgtgaaggaaaaggcccttctcactggccaagacaattccattgctgacccaccgagagcaggaagagtagcttataaagacccgtttgcacaagttgtaacccttgtaatacagtcatcatgcagtgcaaagtatccccacctccttagtttaaaatatatgcactctcaatgacatttgagctcatgctcgacatttcccctctagcattcactgttgggtaaaaaatttcacttgaaataagaataaagctctagatttttattcaaattattttcccaagcaaactataagcctggggctttctcccagcctggggtcaacatggctcagtggaaattgggatgagggaagagggaaattgacatggggtagggcttgggagacctacgaccatggtcaaacaggatggaacagctggatttaagttgacactaagaggtagagccagaagccattccctggggcagtaatatgtggcggtactgttgtgcaatatttatgatcattacaaccttgttacccgcccttgctagcccccacccttgctccatttcactttatagcacttactaatttctaattctccagagtgtaaatgccacaaagacagagagttctgtgtgttttatccattgctgtttataaccagcctctacagtaggatatacagccagtccttcataaaatattcattaaaaagaaaagatgaatgatcacatttgaagttcaaaaagactggagggaggaagatagatttgaggggctacttaggggtctggcatttggtagatggtcataattagactgaggtagaggagatgggtatggttgagaggtatgcaggattaacagcaacaggtcttggtagtaaatgtggtgggctggtgagccatggtgtcacggtaaaattttaaaaactatcaaaaactgaaggtatgtgtgtgacatctgtctccatatattatacatacagtttattgtgaactttactcttataaatgactgcagcacacaattttcaaataataataacaaaagtagtattctttattataaatttcacatagcaaattgattttcactactctaatgttctaattcatgttggcagaattcatatctatagagacccgatgttacaactaatgaagtttagttctgacatgaatactagttgatatttttgtttgtattaagaagggaggcaaaagtgaaatctgaagacccacgtcagaacttcacttattggtcaatgacaggatctattttgctgctgaatgggttaataatttttgaattatagaagtccatttcctcaactttttgtgctgttctcatcataatgcctaaagacatgacacacttacaagtttaatctacatttttaacattttctccaattttttcttaagtcgagacaagtaacaaagcaataaataaagctctggttggtaacatttgccaattttcatggtgaatatacttcctccatggtaaatttcaaactatcgatgcaaggtcactgagggcagagaagggaagagatgcatagcagcactgttaggatctctacatatgaacaccatagatatgaataatctcaaatgcatagatgataggaaaatgtaataaaataattaggaagtgatgtttcttcatatatattatctttgctttagtataattgacttaattgtaagttaataacatttaacttttaataattaaatttgtataatttgttatttaacaataagccacaaaattccagaaggtgtaacaatcagctatcatgagccaatactagccagctccagctcatgactatcacagaaagggaggttctaagaaagatgccagaagcttggcttgcataactgtaaagaggcttctaccattttgaaaggtaacagtggagaaccatatcagcatggggtggggtggggggcattgggatcatggatttaggatcagacatgtcaagtctgacatgtcaacaaaacttccaagtggagaagcccagttcgcaattggatatatgagtctggagctcagaggaaagaccataggtggagaaatagagtaatgagtcatcagtttacatgtggtaaatgaagctgtgggcatgggagacagttcctagggaaagagaacacagtaaaataagaaaagcttggtccaggcctttagaaactacggttaatggccagctaaagacaagactacaaatgaagtagaggtcagtccacccaaggcataagaggaaacccacgacctctacaatgagatctacaaaccactgctccaagaaatcagagatgacacaaacaaaagtaaaaatattccatgttcatggatagaagaatcaatatgatgaaaatggtcatgcttctcaaagccaaagcaatttatagattcaatactattcccattaaactaccactgagattcttcacaaaactagaaaaaaaacactattttaaaattcatatggggccaaaaaagagtccaagtggccaaggcaatcctaagtgaaaagaacaaagctgcaggcatcacactacctgacttcaaattatactacaaggctacagtaaccaaaacagcatggtgccagtacaagatcagagatatagaccaatggaacaaaatagagagcacagaaattagaccacatacctacagctatctgatcttcagcaaacctgacaaaaacaaacagtggagaaaagattctgtatttaataaatagtgctggaataactggcttgccatagacagaaaattgaaactggatctctttcttacaccatatataaaaatcaactcaagatagattaaatacttaaatctaaaacccaaaaccataaaaaccctagaagaaaacttaagcaattcaggatataggcatgggcaaagatttcatgatgtagaaaccaaaagcaattccaacaaaagcaaaattgacaaatgggatctaattaaactacagagcatctgcacagcaaaagaaactatcctcagaataaacagacaacctatagaatgggagaaaatttttccaagttgttcatctgtcaaaggtctaatatccagcatctgtaaggaacttaaacaaactgacaagcaaaaaaaaaccaaaaacaaacaaacaaaaaaaaatcccattaaaaattgggcaaaggacatgaacagacacttctcaaaagaagacatacatgcagccaataatcatatggtaaaaagctcaacatcactgatcattagagaaatgcaaatcaaaaccacaatgagatatcatctcattccggtcaatggctattattaaaaagtcaaaaaataacatatgctggcgaggttgtagagaaaaagaaacacactgttggtgggggtgtaaattagttcaaccattgtggaaaagagtgtggtgattcctcagagacctagaggcagaaatatcatttcacccagcaatcccatttgtgggtatatacccataagaacataaatcattctattataaagatacatgcatgtgcatgttcactgcagcactattcacaatagcaaagacatggaatcagcccatcagtgatagactggataaagaaaatgtggtacatatacaccatggaatactatgcagccataaaaaagaacaagatcatgtcctttgcagagacatggatggagctggaggccattatctttagcacactaacacaggcacagaaaccaaatactgcatattctgacttataagtgggaggaaaatgatgagaacacataggtacacatagaggggaacaatgcaccctggggcctacctgagagtagagtatgggaggaaggagaggatcaggaaaaataactaatgggtactaggcttaatgactgggtaatgaaataatttgtacaacaaagccccatggcaaggatttcatgtctaaaacaccaaaagcaatggcaacaaaagccaaaattgacaaatgggatctaattaaactaaagagcttctgcacagcaaaagaaactaccatcagggtgaacaggcaacctacagaatgggagaaaatttttgcaatctactcatctgacaaagggctaatatccagaatctacaatgaactcaaacaaatttacaagaaaaaaacaaacaaccccatcaacaagtgggcgaaggatatgaacagacacttctcaaaagaagacatttatgcatccaaaagacatgaaaaaatgctcatcatcactggccatcagagaaatgcaaatcaaaaccacaatgagataccatctcacaccagttagaatggcaatcattaaaaagtcaggaaacaacaggtgctggagaggatgtggagaaataggaacacttttacacagttggtgggactgtaaactagttcaaccattgtagaagtcagggtggcgattcctcagggatctagaactagaaataccatttgacccagccatcccattactgggtatatacccaaaggattataaaacatgctgctataaagacacatgcacatgtatgtttattgcgccactattcacaatagcaaagacttggaaccaacccaaatgtccaacaatgacagattggattaagaaaatgtggcacatatacaccatggaatactatgcaaccataaaaaaggatgagttcatgtcctttgtagggacatggaagaagctggaaaccatcgttctcagcaaactatcgcaaggacagaaaaccaaacaccgtgtgttctcactcataggtgggaattgaacaatgagaacacatggacacaggaaggggaccttcacacaccagggcctgttgtggggtggggggaggggggagggagagctttaggagatatacctaatgttaaatgatgagttaatgggtgcagcacaccaatatggcacatctatacatatgtaacaaacctgcacgttgtgcacatgtaccctgaaacttaaagtataattaaaaaaaaaacaaagccccatgacacaactttatgggtataacaaacctgcatattctgcatgtgtacccctgaacttaaaatgaaagttaacaacaacaaaaaaagaggaaccctgaaataatgtggtgctacggagccaagaacagacactgccacaagaagaaatcaacagtattgaacaataccaagaggtttaagtaggatggaaacttgaggttatcgatgacattaataagaacatttcagtgcagtgttgggttgaattcagatcacagagaactgatgactaaacagaaagtgagacaatacagacagaaaatatgattttcttttctttcccagaggttaactataaaagggcgaaagatatagactcaggtgtggagtaatgtagggttgagggaaggcgtttcttttatgggaaataaaaattccattcaagtccaaaagccaaggggtagtgataaaggagctgaaaagaaattgtgtaggcagtttaagggtaaatgaggtctcggtgaaatttccttttaataaaaagcagccccaaaatcatttcttttctaacaagaagcaccctgaaaaatcaagctgcaagcaaagataagcaagctggagacttgcatagatgaatgttggcagctctgccaatattaaagggatacctggaagtcaggtaggtgtattcaacatggagattccctcttgcctttttctttgtcgccaagtgtgcaggtaaagtggcaccagctaggtaaagactcctttgcataataaaagattagggtgggttggccagcctcttcccaggctatgtaaatggcacacctgatccaaccactcctctagatcctgtgtaaatgagacactgcttccccaagctcatctataaaatcaactgcatctcgccccaaacccaaaaacctgctcaggctctcttcctctgaaaaggaagctctctcttctttctttcgcctattaaacttctattttttttcttttttttcttttttttttctttttttgagacagagtctctctttatcacctaggctggagtgctatggcacgatcttggctcgctgcaacctctgcctcctgggctcaagcgattctcctgcctcagcctcctgagtagctgggattataggtgcccgccagttcacccgtctaattttttgtatttttagtagagatggggtttcaccatattggccacattggtctcgaactcctgacctcgggtaatccacccatctcggcctcccaaagtgctgggattacaaacatgagctattgcgcctggcctaaacttctactcttaaataaactccttgtgtgtccacatcttcaatttccttagcatgagacaacgaacctcaagtatttctctagacaaacaacaccacttcagtaggaccagttgcaagacgcaagatccattggagaatgaaaataagtgacggtatcatgagaacctgggaggaatttgggagccaaggcacagggaagcacttggccttaaataagaggaagggactcactgtaactcagaagctgagaagaagggatgtagataggtttgtatgtgtaatttcacaaataaaatagaatatctatttgattatttttttcctataaaataggagctagatcatctcctgagagggtacagggagatttttgagacacttgaggagggtgggtatcaccttaaattatttcaagttattaattagatttggctacttagtaatagaaccaatgttttcttcctttgaaaattgtgttaaccagcaacacattttaaccaagaatagtttatttaagaaacgcaaagttggttttcaaaattagaaaatctgtaaatgtaattcacaacattaattaatcaaaaaatttaaaaagaatgattatcttcacatatgccgcaaaaacattaataacaatgagaacaatctccaataacacaggattaggtagctacttccttaacatgataaaatgtatccttcttaacccataaaccaagcattctaatcaaaagtcaagaacaaagtatctacattttgaacttacagttccacttctggggatttatcctacagccttgcatgacaatatgctctattttatcaatctttaagatgtgttttggatattgggatgagtaatggatgtgacatgatttaattggtggcattttttttttcctttttagtgacccataaaataaaagtgtattattaaggcatcttagattatataagatcagtttgtagaagattttttattatggtaaatttctgataagactggaagcaaagaagcaaagcatgcatcaatgtgtatagttgttatcattcatgcaaaaaataatcaatgttagtagtccatattagatacctacattatatctatgttaatgaatggatatattatgtgtctgtactgatatgcacccacacatatacctatttgctaatatatgtgtataatagctctgccaggattgtggtaactttggttgcctctaaagaagggaggtgatggctggaagagagaactggaggaaaattttacattccctttgtatttgtataaacactgtgccttgtgaatatatcatctaaaataaaatacaattgaaaaccaaaaaaaagagaaaaaatcagctgtagacattgtaaatctctgctttgtgtaggcttcacaattatgcttaccttttgatagaatatatacagattttagcccctgggcctggggaataagaaggaagtttctttattctgagtctagatatgccaggaaatcttccacttgatgactaaatgttttctccatacgctctgtgatatatttagtatcatgaaaactctttaaaagaatgatttggggtgactggactaacatgccttagaaatgaatgccactcttcaaattctcaaaaaatctttattttctgattacaaaagcaattctttttcaggaaaaacaaagaaacattatagaagaaattgctataataaaaaaaaaaatggaaatacattttagccaaagtgggagttagggatgtattcaggttcaggtatgcctcttccaaggagcttttggcattttaaagaacagtgatgttgataaagtcatcttgacccagctaatgtcaaatggtggcatcaaaatttgtgtcaaaatgtctcacaaatcaaaaacctgcattaaactatcctgcctcctatgcatatggcgtgccatgactggttccacacaagagggccaggtctctgcaattccttgaggccatccctatatcctcatcactgagctcagtacccggcacagggaggtgatcaggaagtgcttattgaatgtgtgaagaggtggcatggggtggtggaaatcctaccagcctagtcatcaggtacccttcagtcccaaagctcaaagcctgcaagttgtagtcttgagtaagtcaccgaatgcctctgagccttggtctgttatccataatgggggtataatgacactcttctcgttgtaacaaaaaaaaatttaatctactcaaaagggataacacagctctaggcacactgtgtgtttgtaacgatgatgtgccgaaaattgggcacactgagtgtttgtaatgatgatgactactctagggaaggaatgtaggctgaaggagtaaagtcattgtgcgcagttacactggggctggtaggggtgatgatggctgttttattagggaatgggggcccttgggcaaggctctatccagtcacctctgcaaatatgctcagtccattgcaaagagagacactgttaaataaaataaaaatatgtattctttgagtatctgtttaaaactaggaggacattcatataccttgtctgccaaaggccactggagaaaccatatctgaaggattggtatgacaacaagctctcagatgccagtttcacccaacccttcaacctgcagtcctgtgatcctcctgcaggatcctggtcaaaggcccttctcatccccacaacatcttatctctcttgcatcatcttcccccaggttctcaggaaacaacctcaccttttatttcacaaagaaatcagaaatagccttatggagataaaatccacataccatatgattcatccattgcaagcatataattcaatagttttagatattcacagaattgtgcaactatcacttcctttttagaatattttcatcaccctaaaaatgaactcttataaactaagtatttgcagccctccaaaattcatatgttgaagccctaaactccaatgagatggtattaggagatagggcctttggggggtaattagggttaatgagatcagggagtggggccttcatgatgggattagtgcccttataagaagagacaccagagagtttgctctccctcgttctctctctctgcatgggggacacagtaagaaggcaaccatctgcaagccaggaaaagagccctcaccaggaaccaaactggctagaactttggcctgggcattggacttccaatcctccagagctgtgagaaataaatttatgttgtttaagccacccagtctatggtattttattatagaagcccaagcaactaagacagaccccatgaaaaacttactccccattcaccccttagcttccattcccagccccaggtaaccactaatctactctatgtctctatagattttcctattctggacccttcatatacattaattcagacaatatgaaaacactctgctgagtaaaagcagacagttacaaaggactgaccacatattgtctgatttcatatatggatgtatgtttttatttttcttgggcatacatctaggagtggaattgttgtgttataactgtatgtttagccatatgctaaatgtaccaggctaaatgcaccactttacattcccaacatcagtgtatatgtgttccaatttcttcgcatccccaccaacacttgttactgtctgtattttgtgttttgccatgctagttggagagaggtgttaggttgtggttctgttctatatgacttgccttctggaacacacttatctcctgatttataattctactgtcttactgtctaccaggtccttctgttatcaagcaaagaggatgctttggttagaaacactctagtcaggtaagaatggcatgcaaaaagctgtacatatttaatgtataccatttggtttgtctggagataagtatgacctgtaaaccatcaccacaatgtaaatgataaacctatacatcacctctaaaatttttcttctacttgctttatttattattataagcataccttgttttattgcacttcactttactgcacttttcagatattgagttttttacaaattaaagatttttggcaaacttgcacccagcaagtctattgacatcattttcccaacagcatgcacttacgtcaggtctctgtgccgtattttagcaagcctcaaaatacttcaaactttttcattatttttatatctgttatgatgatctgtggtcagtgatctttgatgttactcctgtaattgttttggggagtcacaaaccacatctatacaaaacacggtgaacttaagccataaatggggtgtgcattctgactgctcccctgactggctgcctgtctctcttcctctcctcaggctttcctatcccctgagacacaacaatattgaaattaggcaaattaataaacacttgcattgcccatctgtaaaaataactcctcatctgataactcaagtggtttcttgagaagggagctactcctggttagacgctgtgaacattgttgaaataacaacaaaggagtattatataaacttagttgatagagctgtggcagggtttaagagagctgactccaaatttgcaagaagttctactgtgggtccaacgctagcaaacagtattgcgtgctacagagaaatctttcatgaaaggaagagtccattgatgtggcaaacttcactgttgtcctattgccataacaaccccagccttcaacaatcattaccctaactggtcagcagccatcagcatcaaaggaggacattccaccagaaaaaaaaaaaatatgacctgctgtattagtccattttcacactgttataaaaatacttcctgagactgggtaatttataaataaaagaggtttaattgactcagtttcacatggctgggaggcctcaggaaacttaagaattacggtagaaggggaagaagccaccttcttcacaaggtggcaggagagagaagtgcaggggaaactgacacttataaaaccatcagatctcaagagaactaactcactattatgagaacagcatggagaagaaccacccccatgattcaatcacctcccttgacatatggggattacaatccaagatgagatttgggtggggacacagaaataaaccatatcatgtgctgaaggctcagatgatcactagcattttttagcaataaaatacttttagttaaggtttctacattattttttagacataatgatattgcacacttaagaggctacagtgtgggatgaacataacttttgtatgcactgggaaaccaatacatgtgtatgacttgctttactacaatattcgctttattgtggtggtctgaactgaacctacaatattttcatgatacacctgtattttgtgataagagcacttagcatgagactttgaacaacgtgcatctttgatccctagatctcaaccctcacacgccctctaggacttcctttccattactcttgatccttctcatctgtatcatctaccatggaaatattccttttcactggtccttcctccacaaacatatccaatgtagcagagattctgaggcaaacgctggaagaattctagtcctgcttctctacttttgagttgcaggccttgtgctttgtttttttattatccatattaattatacctacctcataacactgctgtggggatgatacaaatcaatgcatctaatgcctggcatataataagtgctgagtgtttgctattatgtcattatctttcaaattgcattcataatttgaataagtaatatgtgcaaatggtacagaaatttagataaaatgttctgcagttggatgtaagtttctctccaatcaccttttcacaactttacctgagaggtgagcactgttacccactgcttgaggattcccccagaaatggatattctatacttacctgagaagaccgtggaagtgaaaattcctacacatagtagcctcctaagcacagcaccctttctcttgattttttttttcactgaatatctattttggagctgtttcaatgttagtgccaaagacttatctcatccctctcaacacctgctactaactgaatgtgtcataatggatttaaacatttcctaatataagtacttaaaaatttttttctactagtttttttttttaatcctgcaaggccttgtccatacataaattttacatgtgtgaatatacctgtacattaaagactagaagagaaatttccaagtcaaaggacagttgcactttaattttataatggttgtaaatatgatatttgtcaggcctctgagcccatgccaagccatcgcatcccctgtgacttgcacgtatacgcccagatggcctgaagtaactgaagaatcacaaaagaagtgaatatgccctgccccaccttaactgatgacattccaccacaacagaagtgtaaatggccggtccttgacttaactgatgacattaccttgtgaaagtccttttcctggctcatcctggctcaaaaagcacccccaccgagcaccttgcgacccccactcctgcccgccagagaacaaaccccctttgactgtaattttcctttacctacccaaatcctataaaacggcgccacccttatctcccttcgctgactctcttttcggactcagcccgcctgcacccagtgaaatacacagccatgttgctcacacaaagcctgtttggtggtctcttcacacgcacgggcatgaaatttggtgccgtgactcagattgggggacctcccttgggagatcaaccccctgtactcctgttctttgctccctgagaaagatctacctatgacctcaggtcctcagaccaaccagcccaaggaacatctcaccaattttaaatcaggtaagtggcctcttcttactctcttctccaacctctctcactgtccctcaaccactttctcctttccactcttcaatctctcccttctcttaatttcaattcctttcattttctgggagagacaaaggagacatgttttatctgtggacccaaaactccggcaccggtcacgcactgggaaggcagccttcccttggtgtttattcattgcagggatgcctctctgattatacacccacatttcaagggtgtcagaccacgcagggacgcctgccttggtccttcacctttagcggcaagtcctgcttttctggggaagggacaagtaccccaaccccttctctccttgtctctaccccttctctgcttttctgggagaggggcagtacccctcaaccccttctccttcacccttagtggcaagtcccgcttttctatggggcaagaatccccagtcccttatttccatgccccaacctcttatctctgtgccccaatcccttatttccatgccccaacctcttatctctgtgccccaatcccttatttctgcaccctgacctcttatgtctgtgccccaatcccttatttccacaccccaacctcttatctctgtgtcccaatcccttatttccgcaccccaacctctctctgtgccccaatcccttatttccatggcccaacctcgtatctctgcaccccaatcccttatttccactccccgacctcttatctctgcgctccaacccctttcccacttttctggaaggtaagaacccccgaaccccttccctccatttctctattctctcttttctctagacttgcttccttcactatgggcaaacttccaccctccattcctccttctactcccttagcctgtgttctcaaaaacttaaaacctcttcaactcacacctgacctaaaacgtaaatgccttattttcttctgcaatgccacttgaccccagtacaaactcgacagtagttccaagtagccagaaaatggcactttgaatttttccatcctgcaaaatctaaataattcttgtcgtaaaataggcaaacggtctgagatgcctgatgtccaggcattcttttacacatcagtcccttcctagtctctgtgcccagtgcaacttgtcccaaatcttccttctttccctcctgcctgtcccctcagtaccaaccccaagcgtcactgagtctttctaatcttccttttctacagacccatctgacctctcccttcctccccaggctgctcctctccaggcggagctaggtcccaattcttccacagcctctgctcctccaccctataatctttttatcaactcccctcttcacacctggtccggcttacagtttcgttccatgactagccctccccctcctgcccagcaatttactcttaaaaaggtggctggagctaaaggcatagtcaaggttaatgctcccttttctttatcccaaatcagatagtgtttaggctctttttcatcaaatataaaaatccagccccgttcatggctcgttcggcagcaaccctgagatgctttacagccctagaccctaaaaggtcaaaagggcgtcttattctcaatatacattttattacccaatctgctcccgacattaaataaaactccagaaattggaatctggccctcaaaccccacaacaggacttaattaacctcaccttcaaggtgtacaataacagaaaacagttgcaattccttgcctccactgtgagacaaaccccagccacatctccagcacacaagaacttccaaatgcctgaaccgcagtggccaggtattcctccagaacctcctcccccaggagcttgctacacatgccagaaatctggccactgggccaaggaatgcccgcagcctgggattcctcctaagccacgtcccatctgtgtgggaccccactgaaaatcggactgttcaactcacctgacagccactcccagaacccctggaactctggcccaaggctgactgactccttcccagatcttctcggcttagcggctgaagatgacactgcccaatcaccttggaagccccctagaccatcacggacgccgagcttcaggtaactctcacggtggaaggtaagcccgtccccttcttaatcaatacggaggctacccactccacattatcttcttttcaaggacctgtttcccttgcctccataactgttgtgggtattgacggccaggcttctaaacctcctaaaactccccaactctggtgccaacttagacaatactcttttaagcactcctttttcattatccccacctgcccagttcccttattaggctgagacactttaactaaattatctgcttccctgactattcctggactacagctgtatctcattgccacccttcttcccaattcaaagcctcctttgcgtcctcctcttgtatccccccaccttaacccacaagtataagatacctctactccctccttggctaccaatcatgcaccccttaccatctcattaaaacctaatcacccttaccccactcaatgccaatatcccatcccacagcacgctttaaaaagattaaacctgttatcactcgcctgctacagcatggccttttaaagcctataaactctccttacaattcccccattttacctgtcctaaaaccagacaagccttacaagttagttcaggatctgtgccttatcaaccaaattgttttgcctatcccccctgtggtgcccaacccatatactctcctatcctcaataccttcctccaccactcactattccgtgcttgatcttaaagatgcttttttcactattcccctgcacccctcgtcccagcctctcttttctttcacttggactgaccctgacacctattaggctcagcaaattacctaggctgtactgccacaaggcttcatagacagcccccattacttcagtcaagcccaaatttcatcctcatctgttacctatctcggcataattctcataaaaacatacgtgctttccctgctgatcgtgtcctattaatctcccaaacctcaatctcttacaaaacaacaactcctttccttcctaggcatagttagtgcagtcagaattcttacacaagagccaggaccgcaccctgtagcctttctgtgcaaacaacttgaccttactgttttagcctacccctcgtgtctgcgtgcagcggctgccgctgctttaatacttttagaggccctcaaaatcacaaactatgctcaactcactctctacagttctcataacttccaaaatctattttcttcctcatacctgacgcatatactttctgcttcccggctccttcagctatactcactctttgttgagtctcccacaattaccattgttcctggcgtggacttcaatctggcctctcacattattcctgataccacacatgacccccatgactgtatctctctgatccacctgatattcaccccgtttccccatatttccttctttcctgttcctcaccctgatcacgcttgatttattgatggcagttccaccaggcctaattgccacacaccagcaaaggcaggctatgctatagtacaagccactagcccgcctctcagaacctctcatttcctttccatcgtggaaatctatcctcaaggaaataacttctcagtgttccatctgctattctactactcctcagggattattcaggccccctcccttccctacacatcaagctccaggatttgcccccacccaggactggcaaattagctttgctcaacatgtcccgagtcaggaaactaaaatacctcttagtctaaatagatactttcactgaataagtaaaggcctttcctacagggtctgagaaggccaccacaggcatttcttccctcctgtcagacataattcctcagtttagccttcccacctctatacagtctgaaaacagaccagcctttattagtcaaatcagccaagcagtttttcaggctcttagtattcagtgaaacctttatatcccttaaggtcctccatcttcaagaaaagtagaacggactaaaggtcttttaaaaacacacctcaccaagctcagccaccaacttaaaaaggactggacaatacttttaccacttttgcgtctcagaatttaggcctgtcctcggaatgctacagaatacagcccatttaagctcctgtatagacgctcctttttattaggccccagtctcattcgacaccagaccaacttagactgtgccccaaaaaaacttgtcatccctactatcttttgtctatcatactcctattcaccgttctcaactactcatacatgccctgctcttgtttacactgccagtttacactgtttctccaagccatcacagctgatatctcctggtgctatccccaaactgccactctaaactcttgaagtaaataaataatctttgctggcaggactatgctgaatctctttaggcactctctaatcagatgtcctaggtcctcccaattcttagaccttttatacctgtttttctccttctcttattccatttagtttttcaattcatacaagaccgtatccaggccatcaccaatcattctatacgacatatgtttctcctaacaaccccacaatatcaccccttaccacaagacctcccttcagcttaatctctcccactctaggttcccacaccacccctaatcctgcttgaagcagtccttagaaacattgcccattctctctccataccacccccaaaaattttcgccaccccaacacttcaacactattttgttttatttttcttattaatataagaaggcaggaatgtcaggcctctgagtccaagccaagccatcgcatcccctgtgacttgcacgtatatgcccagttggcctgaagtaactgaagaatcacaaaagaagtgaatatgccctgccccaccttaactgatgacattccaccacaaaagaagtgtaaatggccggtccttgccttaactgatgacattaccttgtgaaagtccttttcctggctcatcctggctcaaaaagcacccccaccgagcaccttgcgacccccactcctgcccgccagagaacaaaccccctttgactgtaattttcctttacctacccaaatcctataaaacggcgccacccttatctcccttcgctgactctcttttcggactcagcccgcctgcacccagtgaaatacacagccatgttgctcacacaaagcctgtttggtggtctcttcacacggacgcgcatgaaaatattaacatattgtagataaataatattattgatatagtcttgaacattataaccatataaccataaatacaagcatatgtaatttaagtataattaaaatttataataaatattagtaaatgtatccttaaaaatataccaattggccatttccatgttttaattttcattgttatcattcctttctaatttagacttaaggtctttctgtctagaggggccatgagccaagatagccactcttcaggaaagccctgccagttgggctgggggttaggtttggctatgtcagtcaggtgagacacagagggaaggtgaaacccaaatgcatgcaacagaagaaatttattacttacaggtcccagagaggttaagaagcctgagatggaggaatggggtggtccaagggcaacaggaagttcaaccagcaagtgtagaggggcaggggcactggtgggactatgtctttatttatttttttatttttattatactttaagttttagggtacatgtgcacaacgtgcaggttagttacatatgtatacatgtgccatgttggtgtgctgcacccattaactcgtcatttaacattaggtatatctcctaatgctatccctcccccctccccccaccccacaacaggcccccgtgtgtgatgttccccttcctgtgtccatgtgttctcattgttcaattcccacctatgagagagaacgtgcggtgtttggtttttttgtccttgcgatagtttgctgagaatgatggtttccagcttcatccatgtccctacaaaggacatgaactcatccttttttatggctgcatagtattccatggggtatatgtgccacattttcttaacccagtctatcattgttggacatttggcttggttccaagtctttgctattgtgaatagtggcacaataaacatatgtgtgcatgtgtcttcacagcagcatgatttataatcctttgggtgtatacccagtaatgggattgctgggtcaaatggtatttctagttctagatccctgaggaattgccacactgacttccacaatggttgaactagtttacagtcccaccaacagtgtaaaactgttcctctttctccacatcctctccagcacctgttttttcctgactttttgatgagggactatgtttttagtgaggtccatttcatgctcccttaggccttcctgaggggcctgtgggttgcctaatttaaagaaaaaaaaaagaggaatttcatttgcataacggcataatgcagcaattcaccatgtggttttatcatagcagctgtgagatgagccgggtctggggtcagtgggatgacaaatatgtgagttcatcacaaacaacaacatggtaagggcaagttttaatcaggccaaaggcgattgtgcactgagactggatttcaaacaactaacaccaggcctaaacatgaacaccaaggcatcatctgtattaaaacaatatacgctatcccagccatactacaagggtgtctccgtccctacatcttctccaacgagctgtgttatctttgattcatgccaatctgacacatgaacaacagtattctgatgtggtctaaatctgcaggaatcttaatttgagtgagaaggaatatttctcatgtgtctaggagctctttgtgcttggaggaatggcagacactatgtgtgtgtgtgtatgtgtgcatatatatatatatatatatatatatatcctttccttgttttccattttattataaatattttctcatagctttgttagcaaaattaacccattgatcatgataaaaaaatgcaactttttttgcaagattgtcatttgtcttttgaatttgtgaaggttttcccaattcagagctctatctagtcacttttattagtctaggtcttgtggaacactttaaaaagaattcggcattcttttgttttcttttaatgttttctgtattgttttctttttaatatattgagctattgaagattagttttccactattaattttttcaaatacaatcaagtcatctttgtatcccttaattaataattattgttttccttgctaatttaaaagagcatctttaaatatttagatctgattggatctatttatgggcctcttccatttatgtcttagctaagaccaacatcactgatttaattattgtatttttatgtaagaaatttttttccagatgagattggtcatgttcagggagggaaaaaaaaaacaaaaaacgaaatcatatccttttcagtaacatggatgcatctgtaaaccagtatcctaagtgaactaacacagaaacagaaaacccaagtgctgcatgtcctcacttataagtggagctaaacattggatacacatggtcaaaaaaaatgggcactagagacctgggggaatacacaaggaggaagagactgaggaagggatgaaagaaactaggtactgggtactgtactcactacctgggtgacagattcatctgtactcaaaccctcagcatcatgcaatctatttttgtaacaaccctgcacatgtaccccctgattccaaaataaaagttgaaaaaagaaaaggaatatttttgtttccagaaagcttctttattcctctcttcaaaaagctatgagaatgcaaaggcataagaatgatatcatggactttggggacttgacagaaaggataggagggggtgagagataaaagactacacattgggtacagtgtacactgctcaggtgacaggtacaccaaaatctcagaagtcaccactaaagaacttatccatgtaaccaaaaaccacctgttcctcaaaaactattgaaataaaattttaaaaagtaaaataaaatttgcagagcatcattaaaaatgatattatatctttattgatatagtattaaatgtatagattaatgaagggagacttgccaattctataaagttgtcttttcttgttcgggcagaatatgtttttccttgaccaagtctacatgtggtaatacttcatagtgctttaacattttcttcatcatggtcttcaacattccttactaagtttaccccaagttatgtcatgtttttgttgatattacaagtgtgccgtttctttcactagaatgtcccattgcttgtgtataagacatcaattgatgtttgtgtatttcatagtcatatcctgacactttctggattcttttattataattgtttttcaagtagttcctttcagtttttcatgtttttctataatgaaaatgttgttttatccttttgtttctctctcccttctgattgcattgaatattagctccagattaagaaaaataagagtgaaaacatttagcattattttgtcttcctgttgatttatggggatgcttccagggctttcctaagaaacattaaagtgactttgggatgaagatgtgcattttaaaaatattttaatatgaacattttaaaacatacaaaaataatatatacatacacacacatatatatataaatttgttgaattagtcaaaaaaatacagaaatcgtaaatctccaaaaaataagattattcttctacatatacacaaaatgactatcatgcattaaaaagttaataatgattctattataacatgcagctcgttttaatatgtattcaactaattcaaaacatggcttttatagctgatttttttcaaatcaggaaccaattagttcacagattgcatgtacttgatatatgttatgttggatatatttcattattgatgagaaactatgtacttacttttttcttattaatagttgttaaatttatcaactttttcagcatttaaggagaggtttataaatttttctttttttctcgataatgtgtattatcttattgttaaaagatgtccaagtattgaaggaatttgccctctgggaataaagctcttggtgttactttgtcagtgtattgctggatatttttactaagtgagatttgcctgtgctttttgcttttcatcctttttttttaacctttgatagcaaaactatgtttatgtcatttttagaaaagtaagatcatgtccttttcctaggccctgaaatagtttaaatagcactgcagtcagttcagcttccaggatggtggtgaaccacccccacaaaccaacccctctgttaatacccacaaacacgaggagaatgcacattgtgttttctctccactctgtacaggaagtcctcccttaatgtcatcaattggttcttagaaactgcgattttgagcaaaatgacatataaagaaaataggtttttttctcatcaacattataacaaaatcacattattattattattttctttttttttaattttactttaagttctgggatacatgtgcagaacacgtaggtttgttacacaggtatacatatgccatggtggtttgctgcacttatcaacccgtcatctaggttttaagcccctcatgcgttaggtatttgtcctaatcctctcccttcccttgtcccccaccccctgacaggccccagtgtgtgatgttcccctccctgtgtccgtgtgttctcatggttcaattcccacttataagtgagaacatgtggtggttttctgttcctgtactactttgctaagaatgatggcttccagcttcatccatgtgcctgcaaaagacataaccacattccttttttacggctgcatagtattccatggtgtatacctgccacattttctttatccagtctatgattgatgggcatttgggttggttccaagtctttgctattgtgaacagtgctgcaataaacatatgtatgcatgtgtcttcatagtggaatgatttataatcctttgggtatatatccagtaatggaattgctgggccaaatggtatttctggttctagatccttgaggaattgcaagatgccattatttaaggacctggtcattttgcttaaagtcacagtttccaagaatctatcgatgactttgaggattcattgtattactttcagtttctgctacactctcttattatctcttccctgagcttctgcattcctatatatatttttttagttttgctttttgttgtgataattaagatttcatacattttctgaagatatttttagcctcggtttctatgagtttcatgaaatctttcttctggtgagtgttcttgacctgccattttctcttacttattcttgaaatacctttagatagatcttatggtgtttattttttattaatcctcttgaataaggtgaatcctttctggaccacctattagtaggagtttcctgtagagaggggtccagactgtgtttcaggccaggaaggatttttcttcctatgtggggttatgaaagtggattaattattttaactattgcttttccgcagccagtggtgatcagaagctacagactgatcaaaggaaagagacatttcttctttctggtaccctttctccctgtcccttcagctgcttgcaattctcccacctttggccttcccagggactcctactaagtaggtttctgaatgtaccaactatgggatttggaataagtcacctacttgggcctagaatgaagttctgaccctcacatgttgcatttgtgtcctgaagaaaggagaaaaaagacagaaaacaatatttattaaccccctgaccccatgtgtgccaggcactctgataggctctttgtatatattaacacatggaattctggaaacaattggaaaaaatttcaagaataatcattattgtaccaatttttcagatggacaacttgaagcaaagtggagtaagttcctcagccatgattgtagagccagtgagtgctgcagtgggattctgatgactgcaaggtccaagctcttgatgctatctcctgggtttcttcattgcttcccaagtctaagctgctgtcatttagacaaagattctctgattacaatgacagtcagaaagaggttcctgttgccccacctccaacagtggcccatgtccttctgttcctctttgcctgtcttctccatttgccagtccccaaactgccatcagcttgctcagtggaattggctgtctgcattggtccttttctgattagagcattgctcagtgctcctcctaggagcctgtgccccgatttgccagtggctttttttttttttttttaattcaagccttctttgccatgagcccaaaagtgccttctaactggagtttgagaatcaagtagaaatgagctatatgatctgacagcttttgctacctggcttcccatcactttgctccactgacctggagcgcaagcacacactattgcccaactataataaagatgattctatttgttgggagcaaaactctagaacaggagaagtgggccaggctcatgatgtaagctcaggccttgaattcagagagccctgttcagttatccttctcggtaggcaaataattgtcagcatatcctcctgaactaggctatttcctcataaacagggctgaaacatttgtctccctgcccatgaggttgttgtgagtctcagaaagagaattaagatgagaaaacattctgcaaattataatgtacttactaaatgccctctgttactaatagtcttattgcaactgatattagtaggataagtgggtagtgaaggagtgctgcatgagttatgtcaaacaatagcttccaagagaggacgtcttgcttgctattcagtagaacagggcagttgtgtgggtggcttctgcagtcagagcatctagtttgactacaactagcaacaccccttcttatctatgtgattttcaattagctttagaaattgcactagtttattgggaaattgaggtaaggaccaagacagacaaaccttctatgatactcatcatgatgcctgatcaatgaatattggctgctatcgttatgctgttatgtgtgactgaactgagtcaattaattaatagaattagaatggcccttagacacctctcccttctttataagatgaggtctcaagccacacaggtccagaaacttaaccttaatggacccattctcactaattaaactgacaggagatcaatgcaaaaccaggatgtaaaattcttaagcagcactggggactgagaccggttaacatatggcaaagcttagtaaccctatttggaggctgcctcgaggcacacaggaagggagggtgattaaaaggctggagaaagcttcagggctgagaagagaagaagggagattccttcggctctccctttgtctctctaggtatgcaaatgcccccaaaactaaggattaaaaggactgagtttccaaaacacaagtccttggctagcatttcccataagacacagatcaatcttcacagcacaactgtatcagaggctcatgcctctgtccagagctacttccaatttcatgcccaggttttcttcatttcattgaaactcttggtcattcacagaggcttgttttggagccattttgcagaagcctctgagaacaatgcaatttctagtgtcttggtgctagacagggtcccttatatccaccctgattatagcaggaaaaagagacccttgatttttgacactcttttgttcttcctctgactcttgaacacatgggcaatttacccccattcttttttctaagaacatttttcagtataaattgtggcatggaaaatggtatgtttcttctggttccagataaggaaagctgtaaataatttaaagttcctgctgtgcaaaattacccaaacagaaagtacacttttttatgctggcactgaggatggtaaaacaagaaattgtgccaattttcctacaggtgaaattttagcttctttataacataagcactttgactctgaaaaaagtaacataatgagattttgtgcaaggtgtgccagaattaatatagggctatagaaataatagcccaaatttacctttcatccacacacaaagacacaaaattactgaaagtttgtgctgagagcattaagccacaccccagggctcaaagattgtgtcccctaatagcatttatgttgccacaaatgtcagtgtcagcacttcaaacttatgcgaaagctattattttgtggcataaaattctgatgtatatgttatttgaatctctataagccactataatttgaagcatcaatgtgacctatttttcccctcttgattaacaggtcatcataaaatgggttgtgtctattttcacctggcccactgtgtgttgtgagtgccaccagagctatcttgctgtacctccacagattgtaggattttcttcctttatgttgaatttagcactgaaactgacaaagtttcattctcaagaatgaaaaggtcacggagaagaggaggagagaagccactttgctggactttcctccttgggacacttgtgctgagggcatgtgatggaaagagaaatggacttctggtctccagtttgggtgccatatacaatgagggctgcttctctggtcaccagaacagtgacttctgcacacgctcagccatcccagagcttgtccctaacgatccaggaagggatggggcattgggctctatgaagactaagcacaagcactagtaggcaggagccaaatatacttaagaatcataataaaatgtatctatggacagctactaaatataataaaaatgtagtgtacgactggagtttgtttctggcgatagtgatcaactcctctcaccagagggctgggtacatcaggtgtcaaaagttcagtctgttacttccccaactctagtcttttgccaggtttctggctgctgtacggttctgagcaaatgtcaaaaggccagaaggatgagtctccacaggggttaatgagtttagatgatggctttcagaaagaaacagaaagaaaaaggaaggaaagaaagaaggaaggaagaacggaagggaggaaggaaggaaggagggagaaaagataggaaggagagagtgaaggaaggaagaaacagaaggaaggaattaaagagagagaagataggagggagggagggaggaagggaggaatggaaggagagagggagggaaggaaggcaaaaagataggaaggagagaggaagggaggaaagaaatggaaggaattaaagagagagaagttaggaaggagggagggaggaaagatacagaaggaaggaattaaagagagagaagataggaaggagggagggagggaagaaggaagaaaggaaaggaggaaagagggagggagggagaaagaaaaaaaattttaaaacactgcatcctataaaatggtctccacagttgcatgggaggggtgtcacaggcttccctgactgttggagacaaaagaataaatcttcaggtattttacctgcaaagatccccctttgctcaaggtcctcttgtctgccaagtgtgttggtcagcaactggcatccaggcatctgcttgatgtgtttgtttcaccttcacatgtctgttctgacagtgtatcttcagcgggcctttccatggaccttgaaagccctaggtttttccctgatgagcttataacattttgttgttgccaccttctttcaattcttccttctttattaaactataaattctatggggaaagggtttctatctgtcacattcacagttgtatgccttgagcctactggtcaaccctcagcaacacttgttgaataaatgagcccaagatatctcattgtactcctttaggctcatctacaggcaggttctatattctgagatgaaagaggatattgtatttctttcctagattcttcctgggttggccgtatacccagtgctatagtttggatgtttgtccccttcaaacctcaagttgaaatttgatctccagtgttggtggtgcctaatgggagggctttgggttatggggtggacctctaaagagtacattaatgccccttctgggacaggttgggggtgggaggaaggggagagtgaattctagctctatttgttcccatgagagctggttgttaaaaagagtctctcatcttcccccttctcctgattcttctctcaccgtgtgatctctacatacaccagctgccctttgccttctgccatgattgaaagcaggtgagaccctcaccagaagctaagcagatgctggcgctctgctacttgcacagcctgcagaactgtgagccaaataaactcttttcctgataaattatctagccttaggtattccgttatagcaatataaatggactaagacactcagctatcacaaatatgacttggcttgggcactcaggatcttgagaaaaggctgttgatcaagtcatagaggggcttcctcagttctctgcccctgacaacttacttagccttgggtcccaagtgctgtaagtttatcctaggtggaatggagatccttgaagctatgtcacctaacaatgatttcaggcagggctatgtccactgcccttggaaaaatggaaccttgagtctaaacttttccatagaacacacttcaccttccaacctaaaacaatggaagttttccagttggaaattatcccagaggctgatgtacagatttccctttcagtatcttttctgccactaatggattagaagttcccaggactttgattgtcctaagttgtatagttatggggcagttacaagtgtgataaataccatgtgatgataatgggtatatgatcttccctgagcttcagatcaaaatgggtaaactttgaaaatatctacttattacctaaaaaaaaatctaggatgagtttcttgttacatgacagaatcacagaatagactgcttgatagccagtctttacaatttactgtaattgtctctgtcaatctctggagaaaaggggacgtggcaccctggctgagtctgaaagtctgttttgttaccaaattcctgacaaatggacttggagtgaatgccccctctcattgggatgttttgcatggacaacaggattcaaacttggcgtctggtatcttatcatcactttctccccagcgaacatttaatccttcaagtcagagagtaagtaatatatttaacatgtctcaccttcaagctttatttcataaattataaacacctgctttttagtgactgctacttagtctcttttattgtaccaattgttttttccatcataaataattcaggacatatttatcccaaaatagtgcaatttgaaggaatcatagaatagctttcccttaatttttagcatccttgttaataatacccaatgccaagagtgtgctacaactgtccttgcctgactctgcagatagagctgctgactgtgggctatacatggcagtggcagaaagaatccaatccacacagatgtctttcctttctatactcaggacaggctgccaagataaggacacagagctgccatgcacaatgagtgcatgcactcatgcacacgtgacaaccccctggagactgatttagagggacctgagatgtagatccacccctgatttgcctcagggtcaaattcccatcctaacataacctcttggtggggatattgactcttcaaagcagaacggtgtgagaagtatcttaatcaatagctctaccaactcagcaggatttcttgattacatttgtgggcataatcctaatgggatatgacacaggaatgcttcctgctttctggacaagcagcagtgctggtcttctatatgacaggagaatccacctcacatggggtagtcacagaaggagaagaaaaggtagtcaagatcctttaagtcatccttaaggaccctggacccttggaaactgtcagatataggaacatatttttgtgtttctgaagttgaggctttctgaatatatttgtctgcaaattcaggaacctgggctcacagaaagccttgtgaaattaatttacagctgcataaagagtgaaagaactccagagagatctacctttctctgggggcatatgtttacatttcatgggaaaatgagccctgtgaacttgaaggcacctctagcttatagaagtggacatgagggcctacctggccctagaaaagatgtatttacattccaataggttagagtgagaatccaggatcctttctcttgtatctccaaggaacaaaggtttttttcatcctccttttgggaggtttgagaaggtggctgactcttcctcctctagataaggagataaaacctgttcctaaactatgatgtagactttgacatttgcatgtgtaggacatttgtctcagcttttatcattcttaaccccagggttaagaatcagggtgtgagccagttagaatagcaatcattaaaaagtcaggaaacaacaagtgccgcagaggatgtggagaaataggaacacttttacactgttggtgggactgtaaactagttcaaacattgtggaagtcagtgtggtgatccctcagggatctagaactagaaataccatttgacccagcaatcccattactgggtatatacccaaaggattataaatcatgctgctatgaagacacatgcacacatatgtttattgcgccactattcacaatagcaaagacttggaaccaagccaaatgtccaacaatgatagactgggttaagaaaatgtggcacatatacaccatggaatactatgcagccataaaaaaggatgagttcatgtcctttgtagggacatggatgaagctggaaaccatcattctcagcaaactatcacaaggacaaaaaaccaaacaccacatgttctctctcataggtgggaattgaacaatgagaacacatggacacaggaaggggaacatcacataccagggcttgttgtggggtggggggaggggggagggagagcattaggagatatgcctaatgttaaatgatgagttactgggtgcagcacaccaacatggcacatgtatacatatgtaactaacctgcacattgtgcacatgtaccctaaaacttaaagcatggaaaaaaaaaaaaagaatcagggtgggaggatccatgtggtcattattatttgctttttaaataaataatgatcatctctctgtaatctagaacaccaaatgttcacaatcaggataaaattataaagatgaatattaaaaacccaacagaaattcaaagggaaaaaaaattagtctacatttgtttctatttcagctttgtttgtggccagtcaagaaggagggttcgaagagaggtaatagggtaaatggaggggtggggatttgcctttaatttatttttgctgttggagctagttttttgccaaataaatggggttgaattggagtctgttaaatcagggtttctcagcctcaacactactgacaatgtgggtgatagctctttattgtgggggttgtcctgtgcataacaggaggttcagcagcaaccctggcctcaacacactcaatgccaatacaacaacaccaccccacttttggtaacaaccaaaagtccacaccaccccacttttggtaacaaccaaaagtgtatccacacatggccaaatgcccaatagggggcaaaatcacccctgttgagaactactgtcttaaatgcacatgtgacaccattatttttaagcatttgacatagtactagtcatggatgagattgggggatctggtcttctgcatgggcaaattagattattgcctacttgcctaaagaggtatttctagaaacttccattcagaaagaaagctcctgccgtgtgttcactctatttaaatgatgactaaaccctttaatccactgcgttagagcttactctgtgaatacctggaaagggtatcatagtcatacagatccacttgcaagagagtgtcaaagtagatgatcaaggcagcagatgcttttgttgtgatcagcatttgatagaggagaaggcatcagatcacagtgggaaaaggatgcagaaagcaaagaccagaggtaccaaaaatcagattcacttaatacaaaattttgctaagtatgagcaccattgagcattgaaatatgtaaaaacagaatgcacagcatttgagaatgctgttaaaactcacagtgctaacatggaaaatagccctatttgtgacccctttttaaattgtaagggagtgagcagagaggtcagcttgggttaagataagacaggcagacccctcgacagctgaaggcatgggagcacaggaagtctggagattggggctgacatagggaagaagatactccaggaagaatgaatgcaagagcaccttgcctagtttgaattttccttagaaatgtctcattgtctggacccaagatgtggcttatattgaagttatttatctaaattctcctctcctccactggattctagatttttgtgggcagttcctggtcttaaacattaatatttctgctgatgtgcctagcacaggatctgtcacaataggagaatggtaaaataagtgagtccatgccaaaggaaacctgatgttcattaggcctggtgtagtatttctgccactctgtgtggctgtgcctcaagaaggtcatcccaatatggacagtcattcacacctgcctctttagacagcctgtaggagggaaagagctgggcaccatcatgccaagtccttgaagactttcaacatgaaggagctaaaattcccaagtataatagaatatggcttataaaggtatattaatattctgtgctgcaaaacagataacaacaagtttagaggcttaaaacaacatccattcattttctcaattgctgtggttcaataggccaaacccagcttagctgggtcctctgattagagtcacacaacactgtaatgaagcattgactgggctgtgttctcactggaaagctggactggggaaggatccacttccaagctcacacaggtggttggcagaattcatctccttgtggttgtagaaatgagggctccagttccttgctagctcttggctggggacttccacagctcctagagtcacccatagttctctgccatgtggtcttctctataggcagattgattccacaacatgacgtattgcttcttcgaggcccataggagagcaagagtgagtctggaattttatataacacaatgcagtcgcaaaggagctatcccagcacctttgccatattctattgactagatgcaagtcccacccaaactcagtgggagggaattgcacaaaggcatgacagcaggaaacagggataattgggttttatcttagaatctgtctaccatgtgagaaaataaaatttaaaataaaattcagcaattctcccttgagtagcttctctgaagctgttcagaagagatttagcaagcatcacttggcaacaattctgatttccccactggatggcaaagccaaagggaaaagaatgccctacagtataaatttccccccttttcatgcagtggtagccttgcaataggtctgtaggccagagagcattagaaaccaatctcatttaacactttgacctactgcctaaacacagtgtctaattaaagaaagggtgtgtggaagagggatgaaagtccaatcacttcagaaaccctggattgaaattctagagtatgtattcccaaccttctgacattcctgggcaggaccaaatgcctttaccttgacatttatgcatagcttacatcttcttttataatgaagggtaacacctagaaccttctgcccctggaaacctggtatgtctttccttcacccattctgaccaatttcttttggattttccttggaattttgttctgacctcatgagaagtagatttgttttgtttcagtggtgtttgcccagaccctatccttatctactgtttgactaagcacaaaatgttttctttatcaggtaaatgtaattaagaggccagtcactcagcaaactcaatcatttctggctgaaggctaaaaatagaggaagaaaaaaattcttacaggccctaaaatagaggaagaaaaaaagaggaagaaaaaaattctacaaggaagcaaaagtgaatcacattctaaacttctctgtgcagtgaccctttagtgaaggaggaaggagccactatttctacctacttagcagcaagagattctaagttagctccttttcctccttgaactccatccccataaaagggttatttgagtttactgtacaaattagaattgttccttctccccatctcccaccctcaattgccctctgtccctcagcagtgccacaaatgaagatgtgcatctggcttgctgcccaccataacccctgcattgttttcttctgattctcacagtagtcacttgcaattgtctttcatcctgttgcatatcagttgtatggttcttttcttactttgatccttattctaaaaaacaatcacgtatttcctcaattttgacagcatggactttaagccttgtaaaggtctttgaagatctcaaccccctcatcttacagttaagagtagtggtgatgaagctattgaatcattcatcaagagtcatagtgacttttaccaggagtggaagagatcgcacatgaattttttaattgattatacactatattggcttcatgggagggtacaatagagacctggtcccaaagtaggatccctggattgccagatttgttgtgactgcattataagaagacactgtcaagtctcagaaaaacctggaagatgccatagtcagggagacccctctggggcccaatcactgtcccccacacttgcatcacagtcccctcaacctacatcatgtacatgtcgccatctttcttcttttcctagaacccaggctttcttgcaataccagtgccacactcctccatctaccaactctgctccccaatctctgatatcctagtgagttcattaggtccacattctaccactgcccctctttcttaacttgaaacaccaccttttagccatgcctctaccatctgctgcctgataattcctgttccctgtgcaccacatgactatcagatctatcatttatggaatgcctaccaggtgcccagcattgtgcttggtatttatcatcactaatttatttattactaatttaattgccaccaaaaccttatgaaaatggatattatccccattctagacatgaggagactgaagttcagaaagattaatgacttgttcacactcatccatttgttgtggtgccaccaggatttgaatccaagtctgactctggaatccatggtctctctactgccccaacacagcatcccagtatgccttgaattttctggaacattactgatttcaaacacttgtcccttaggactcctgagtgtacacacacatatgtcagattatttattctcaattatgtttagaaaagagagtacctggcaggggacagtggctcatgtctgtaatcccagcactttgggaggcggaggtggacagatcacctgaggccaggagtttgagaccagcctggccaacatggtaagaccccatctctactaaaaatacagaaattagctgagtgtggaaatgtgtgcctataattccagctactcgggaagctgaggcagaagaacctcttgaacccagaaggcagaggttgcagtgagctgagatcacgctactacacttcagtgtgggaaacagagagaccgtgtctcagaaaagaaaaaagaaaagagagtggccatatctatgtataaaactagtgacacacaattattctgcctttgctttagtgcacacatacactcagaaatacgcgtgcatatgtgtaatacatttcatattttgaacaagcagatatttcaacactaaggaatcgtaaaaataaacaaaggtctgtttgcaaagactcataccattactgtcatctgtctaccttgcactacaaacaatttgaagtcacattgattgttttcacaattttctcaaatatttaacaactcgcatccttgcgggggatgttgaggaactagagtggtgttttccgattttgtttttttggttttttggtgggtttgttttttcggtctttttttgtttgtttgtttgtttgtttttgttttggtctaattggcattatatcatgttgaaacattttgagatttttttgaagttaacttttttttttcctttcatttctgagtttcactcccttgtttatcgtttccagcataatttttttttggtatacctctaagtagtcctttgtgaatctacactggatgtttcctgttctttgtgttgtttctaaagaaattgcaattttctgggctctaattaaagtgccccacaggatacttcagttttcttctgcttcatgtaatattgtgcaatttttttttattgtgctttctgctcctctttatggatactgaattctcttctactgtgttcccttaaatgcccataagaaccataaatgaatgtatgtttattatgcctttcaaagtttgaaatataaatgttggatttctactcttttgacatccaacacttaacatgtagtgatgattgcatattcccagctaatgtgatgagtcaataaaggaggattagacagttctgctgatatctaccactagaaatggtgcatataggcaaaggccaaaatgaaagaattctaatttttcttatagaaaagtaataatgtcttctgcttccaggaagatgtattagggcatgtcagaccaataacaccactgcaacaattttttttaagctggataaattacacaacccatatttttaaaggattggaaagctatagtgctatggtttgtatatgtctctcagaattcatttgttgaaaacttaatccccattgtgattaatgccattataaaaagtgctcatgtgagtgagttcccactattgctctcttgcccttccacttctgccaggtgagaacactgcaagagggcccttcccagatgccggcatcctgttcttagaccattctccagaactgtgggaaattacatttctgtttttattaaatgatccagtctcaggtattctgctatagcagaacaaatgaaataagacatatggaaaagccaaagattagaagaactaaagccccagagacagaagagttccttctagtgaggtagtcattgctggctgttttcttcttttggcattatttgccaattctggacatcagttaaagattaggcttatctcaaactaagggatgctcttggtaggctttgggaagtcacatgtgggtagagtgatggcttggaaactattgtcatctccaaacaatttccccatgagacttctgagttctctgacagtgctgggagtggaaaaacctagacacaaacacagattaaaattttctgtaataatctagtgattaaaagactaagtcccattacagggagaagcccttcagcagacatgaagctggcctccctctcaagctgccagccatatttgagcctacgtgcaggaaaaattcaaagcctccaaagggcaaagcattcgagttgagaaaacaggtccctcagtcaaacatctgggaaagtcatgcccaataaaagcagagcaaaatatcccacagagggagggggcctacataaaaacacatggcaggtctctcaagacatttgccagattcaatttctgaacttgtacaaggtgaaaggctaaggagctaagcacaaaatctctaaagggcagaatattctgggctaaggagataaaccaaaacctagaagcaccatatacaagaaacaaggacttgccagatgtgaaacaatcctaaaattgcaatccagccttgaccaaaagtaattttaattggactgaggtgatcagttcctcataatatatgcccacatgaggaaattgaatcctcagcagtggaagatattatctagagcacctgagatttatttatatgcaatacctgaaatataattttaaaaattattagtcagacagtgggatccataagtcagaacatgttaaaaaaaaaatagaggcttctggtttcagctctgacaggtaaagagactagaagttctcatcctttacttaaatcaagagaaagctggaaaaatataaatcagtgactttccttgaactcaacagaaaatggaggtcacagggaaaaagtaacatcaaaatattgagaaacaaacacggagcataatagtcaagatctgcttatctggaacagaagccactggactcaaaaaccggtggggacattcctgtagcaattttgatgagctgttagaggctaaagtataggctagcatgaaagtgagaaagtcctgggagccacagtcttaggggatcctccacacattgtgggcttcacttcctggaaccacactgggttctcatattgaagctttgagaaagatgccctggctctggcagaggaaaggcaatcattatgaaatgtaataagtcatcacaaaaaaaggactactccctagtggaaaagaatttgctagtaccttatcctacctgtgggaaagacatttctctcagtcaagctccatctggcctccctaaggtcaaagaggaaaaagcataatcataaagggtcacagcttcaaggaaatagattaggaatactgcagtcaagaaagacataagaaggaagtggaaaaagaaagccaagttactagaaaaaatactatgaaggtcataacctagagatacaaccacactaacacactgagatttaattatgagattatagaatgctttctcttcttcctaccttaccaccacagtaacaagtttctagtataaaaaacaatggattacagctgaaagagctgtaaaatgcagactttatataagaaggaatacctagggaagcttaaagtcaacaagtgagaaaaaacaatgacattgaaggaaccggaagtctctggtacctacaactgtagcaaacatcaaacacagccagactcctaaccaggttaatgtaaaacagcaccacagcccaatttacctccagtcctactatcaggtacattatgttcagctttcaacaaaaaattacaaggcatacagaaaggctagaaaaaacacagtctgaaaagacaaagaaagataagaaccagattgatattatatagatgttgaaattatcagactaggaatttaaaataaccatgagtattatgttaaggtcactaacagtaaaaagtaacaacatacaataatatatgggtaatataaacaaagagtgggaaactctaagaaaggataaaaaagaaaaatagaaaaaatactgtaagagaaattaagaccatttgatgggatcatcagtttacatgatatggccaatgtattagtgaactttagtatacatcaattaacaacttcctaagctgaaatataaaaaggaaaaaaatagaaaaaatgttacacagaaacagaatatccaaaatctgtgggactttaataaaaataaactcaggttctcctgctttactctcaaaacacagaacacttcacctctgggcaccaagatgtgtgaaaaattttccccaccaacaacaaattctgcacattgcacagcagattttctggtggacaccagctgaatgccctctaatttaatgaatttgatctacctgcaggtagtatcagatctcacaggatgaggagtcagtcccacaagatagcccctacttgagttgccaatcacaagcacagactgtggcctgtacttctgaccaagaggcaataaatcaggctttccataatttatattttgggtttgattacttttctagagtgcctcgacagaactcagggaaacatttatgtttgtcggtttattagaaagaattttaaaaggatacagataaaaggccaggtggaagagatgcacagggtaaggcaagggaaaaagggcaagaacctttcatgccttctctgggcacatcaccctccaggaaccttcatgtgttcagctatccaaaagtcccccaaacccaagccatttggggttttatgaaaacttctttatataggcatgattgattaagtcattgattattgttgatcagcttaactttcagcccctctttcctcctcagagattagggggtgggactgaatgtctcaaccctttaatcatgtcttaatattggtctttcccagtagccagcccctatcctgaagccacctaggggctgccagccaccagtcatcttgttagcttacaaatgatgccctattgctccagagattttaagactgttgggagctgtatatcaggaaactaggagaaagacaaaatatatatttcacaatagcacagggacaatttcaaaagtgtaacatatgtgcgattgttatcccataaaaagaaatagagaacttagcaaaataactatttaaaataataatggccaacaattttctaaaattaatggcatacattgaactacagatcaaggaaactcagagaacaccaagcaggaaaaatcaccctcacccctcaaccaacagccccacaaaaaggatatctaggcataccaaattcaagctgcagaaaaccagagacaaaaaatagatcttgaaaaaatctggaagacaagtaatgatcttacctatagaggaatgaagataagaatttcagcaggctactcatcagaaacaatccaaacaagaacagaatagagtgaaatatttaaaaaattgaaagataaaaagaaccaacttagttagaattctatacaagtgaagtatcttttaaatgtgaaggagaatgaagactttctagacaaagaccaaatgaattcatggccagcagatctgtcctacaagaaatgttaaagtaagttcttcaggaagaaggcaaatgatataggccagaaacggaaatctacataaacaaagaaaaaatgttgggaaaggtataaataaaggcacaataaacttatgcatttttatttttcttaatttatctgaaaattaattgtttgcctatagcaataatagaaaaagttattgagtatagcacatgggtaagtcaaatgaagtcaataatggtgtaaaagatgggagggagatattggaggatgctgctttaaggtaccactttggcatataatttggcatagcattatttgaaaatagacttaaattagtaaaagtaggtaacaaatgtattttgtaaacccttgaccaaccactagaaaaagtattaaagtatcattgatatgttaagagagaaatacaatacttgcttaaaaccagaaaaaaatagaaaaaaagaagagaggaaaggagcaaaatattacaataaatagaaaacagttacaaacatgggagctattaaaccaccacatcaattttaactttaaatgtgaataattgaaataattttattaaaagacagaatgtcaaattggatttaaaaaaggttcaactgttctttgcaagaaatcactttaaatatcagcaatcagatagattaaaagtaaaaggatggagaaagatataccattacacaattaatttattacaaggaggctggagtagctatattatctttaaacaaggaagtctactcttcaaagaaggaatattatcagggattagtaggaaacttatgctatgataaaaggtcaactctccaacaatataataatcctaatatgtgtgtacctaatataggatatcaaaatatgtgaggcaaggagaaaatgatagaaatgaatagacaaataaacaaatccattattatggttggtgagttcaacacccctccatcagtaattaatatatctagcagacagaaaaattaatggggatatagataattaaagcagcactataaatcaactctacctagttaacatttatagaatacttttcctaaagacattagaattcacattattcttaaccttactgaatacaaagtgaaattaatacaactgaaaaatataatgtcgaaaatcgtgggacacagtgaaagcagtgtgttgaggtaaatttataccattaagtgcacatactagaaaagagaaaaatctaagatcaatacactaagattcaatcttaagaaaccagacaaaacaggagcaatttaaatataaagcagaagaaaaaattaccgtattttgcatgtcttaaacaacaagcatttatgaaacatgtatgaaagattgcttactgaggttccaatcatacaattttgggaaaaggcaaatttatagaggtggtaagcagagcagtgattttcagggggctggtggggctgagttgaatagacaaagcacgggagactttctagggcagtgaaactattctgtctgatactgtaatggtggatgcatgatgttatgcacttgtcaaaacccactgaactttatagcacaaagagcaaatgtacacaaattttaaaatcacttaggagttcagggatcccagcacagaatgcagactgtaacaaaaatatcaaactgcattaaaaatgtgtaaaacaatgtcactacagggagtgggggaaacactaacctaagtaaccttggaaatgagtggagtctctaaagctagaagtaaaaataatgatacatagcaccgtatggttgataaggttgtttctcataggagcataggttaacacatgtaaactattatacgtgtatactagacttgaacaattaagtaaaagtggcagatggtgggagccaggtgtctcactgtaggagtggaggattacagacaagcaagggaggaggcaaaaatgattcatgtagtaatagattagcgttagagtcatcagtaaaaacttacatttagtttaacatacatacagatagttacgtatggaaaaaaatgtattaatatgtgtagagatcagcacatatagcccctaatcttggtttctaataccaatctctaacaaaataagtcagaattcttcggataaatatttaattctaggagtgggacagaaaatacccaagatgagcctgcaattgtgttaccagaatgtaaagaaatgctcaaagaaacaatgatggagtcgggcgtggtgtcacatgtctgtagtcccagctactaggaaggctgaggcaagaggatcccttgaatttgaggctgcagtgaggtatgatagcaccctgcactccagcctgggtgaccccagcagacactttgtctcttaaaaaaataataaagaggtaatcccagcacttaaggaatccagggtgagtggatcacctaaggtcaggagtttgagacccagtcagaccaacatggcgaaaccccatctctactaaaaatacacacacacacacaaataatcataataaagaaaaaaggaaaagaaaagaaaagaacactgaagtcaactggacaaattctcaatggtcaaagccaaagtaatttgagcaaaaaataaagtaatattggattatgacttacatattcactagtccatactgatataaataaatgattgagcaactaaataaatgaagaagacaaaaatgtcccatgcagaattgtaaataatgtatgtcgatactccatctttaaggaagtggaacataactccgcacttcttaaatgcaggctgtgtataggaatttcctcccaaacagcacagcaggagaagcctgggaaacaccacctcaggatcaaggttaccatcaatggcggaatgtcatgttgataatacgtaccctagatacatgtgtgaaaatggcacattatatctacactcttttccccaaaaaccagtaaccctggtctaatcatgagaaaatcaccagacaaatcccagtgagggagatgtacaaaatagctgaccagggaaggagagccacagagaagtgaaaactatacaacagaattaagtagacattcggacattgaaaaaaataatatctgaaattaagaacgtattgtataagtttaaaacagaagactacatacagcagaagacagaagtaataagcccaaaggcaggtaaattgaaatacccagaatgaaatacgtcaagaaaaataatttttaaaaagcaaagcataaatacaagtcaggacatagtttaaaggtctaataaacgtgtaattgaagttccaaaaagagaggacaatggagggtggggcagaagaaatatttgaaggaatagtggctaacaatttttcaaaactgataaaagaccttaacccatatacttagaaacttcagcaaaccataaacaggataattaccaacaaattcataccagaacacatttagttaaaatgaaacccagataaaagataaaatctttatatcaagaaaaaagacacacgaccttcaaatggacattatcgatgattacagtctaccttttcaatagagtctatggaagctggaaaaatggaatatctatcccagcactttgggaggccgaggtgggtggatcatgaggtcaagagatcgagaccgtcctggccaacatgatgaaaccctctgtctactaaaaatacaaaaattagctgggcatggtggtgcacgcctgtagtcccagctactccggaggctgaggcaagagaatcgcttgaacccgggaggcagagattgcggtgagccaagatcgtgccactgcactccagcctggtgacagagcaagcctctgtctcaaaaaacaaaaacaaaacaaaaaaaaggaatatcttcaatgtgctgagagaagaaaatgaaacaactttccaacctagaattctattccctcatagattaatgaatgtccttcaaaaagcatgaaataaggacacattttggaaaattaatgtttaattcatttgttggtagaagattgaaatgacaaataatactaaagttagttcttcaagctgaaggaaagcacataccttcaggagggaaggaagagccttggaaggagtaaatacatgcataggaataaaataatattaactgtttaataactaatttaatcttaataatgcattcatccaaaaagttataatagtgccatgtgtgacttataatatatgcagaggcaaaactgtatgataataatagcacaaatgttgagagtggataatacaatgacacttaacgtaagtcttctattatgtagaaggtggtaaaagtcaatacttgtggggcatgagcattcaattcctaaagtaccactgtaaaaataataatactatataagtaaaattctaaaagtgataaaaatgcacttgactaatccaaaagattaataaaagaaccaaaacaggtgggattaataaaaaacaataggaagatgatgaagtttaattcaactctattgttaattacattgcacataaatgcactcaatgatccaattgaaagacgaagaattgattaaaaacaagctccaataatttagtgtttcctgtaaacagacaataaatatatgaacaccattatgataaaagtaaaaggataaaaatgaatatgacactcaaacataaccaagagaaagatgttgtggctacgttaatacaagaaaaccaacctttaaggcaagagctgttactagagactaagggaggtctaccagaaggataaaaggatcagttgaaccacaagatgtaaaatattaaatttgtatgcacttaataacagctacaatatagctaaagaaaacattcgcagaaatgaaaggagaaataaacaaatctactataaatttggagagttcattaaacttctcttggtaacataaaatatagaagaggtagaaaaaaatagaaaggctgtagaataattaaattttaagattaattcaattgccttagcacgtatagaacgctaacttgacatacaaaatacatatattttcaagttcacgtggaacatttgccaaaatagacaatatggtgggccagaataggtctcaggcccaggtgtggtggctcccgcttgtaatcccagcactttgggaggtcgaggcgggcggatgacctgaggtcaggagttcaagaccagcttggccaacatggtgaaaccccgtctctagtaaaaaatttaaaaaatcagccagacatggtggtgcacgcctgtaatcccagctactcaggaggctgaggcaggagaattgcttgaacccgggaggcagaggttgcagtgagctgagatcatgccactgcactctagcctgggcaacagagcgagattctgtttaaaaaaaaaaaaaattggtcccagcaaatttcagagaagtgaaattacacagattaaatcattggcccatgaattaaactggatatcaacaagagaaaaacaactagagtattctcaaggacttggaagttaaacaacacacttctaagtaaacctgactcaaatgaaaaatcatggtggaaataacaaaatactttaaactcaataattataaagatttaacatttctaatctcatagcttacgcagcacttaggagaaaatgtatagctttgaataaatatgttttaaaagaaggatgtttgataattatcaaaactttcatctgaacaagttagagaaagaaaaagaagttaaacccaacaaagtcaaaagatagaaatagtaaagttaacagcagaaatcaatttaatagaaagcaaatacttacagagaatatcaacaaagccaaaagtagatgctttacactaatgatatttataaaccacttgcagagtacttcagaaaaatgagggaatctaaaaattacaaatatcaacatatttttaaaaacattactaagaatcctgtaattgttaaaggactgagggtattatttaatattttatgacaattatttaaaaaattaaataagatgtgaaaaacacacattactacaactgacaaaaaaaaaaaaatggaaaacctgaagatgtttagtattttctaaacaagttgattgcagtaaaattgtttccaccatccaaaccaagatggctttactggtgaattcttcagaatatttaagaaataaataacagcaatctttatgaaaagtttcagaaaatagaagatcaggaaacatttcccagatcaatttataattttgatttaaaaaaaactgtcatgggcatttcaagaaaggaaaatttggtggtgtcatctctctttgatttttcatgtttcttgccttatgttgatgtcagtctgtggatttgaagaagcggaggagagttattctagtcttttcagactggctttgtctgggaaagcccttcaccagtcagaccacccagaggtttggggcaggctatctgccgtgatcagtggcagacttgctgctggagtcttcagacaggcaggccatgagggctagtccagctctgggctctactgggtcagcagttaaggaggcctggtgcctggggctctggagtcgcgcctggaacctagatctgctgtggtagaccagttgattgaatccaagatgatgggcctggagctgttgtttgcagggaccagtctggagcctgggtccactgggctgacctggctctggggtagaccttcagcctgagtctgcaggggccagccaggcactgagctgaacttggtgcttggagacacaggggcagtcctggagcttgagtccatgagggctagtccagcgctgggctctactgggtcatacttggatcctgggtctgctggagcatgggcctgcagggactggcctggcacttggcaggcctggaactgatgtttgcagatggtggcctggtgcctgagtccaggagtgctgacctggtgctggagaggtcctgaagcctggggctgtgtgggccaacctggttctgggcaggcttggctttgaggcaggcttggaggctcagtctgtgcatacctgcttggagtgtggggctgcgggggccatccagtgctaggttttaccaaggcaggcccagggccagggcaaagtccagtgctcacttccttctccttcccccaagcagtgagcatttctctccatgttgtgctgcctgggggttagattacccttgggtgagggtaacctgaaactttcttaccctcttcaatggtctcttagtatttctgtgctacccacacgtgctgtgatgtctcacctggtctcgtgaacgcttgtcaaggtatttttgcatgaggatagatgttcaaacggatgtttctacagggggacaagcacagaaaagtcctgttccaccaacctgctgccatcctcctgtctatatgctatcaacagaggatgagaacatgaacgaatttaaatgttatgttatttcacatagtatttttaaaacatcaaatacttgagaataaatgatcaaagacgtacaataactcgacactgaaaactagagactgcaaacgatttaaataaatgagcatatgtctctgttgagatactcaatgttgttaagtctccccaaattttctatagcatcaataaaattccaatcaaattcgcagcagatatatttgaggaaattaacaagctaaatttaatacttaaacatggaaattcaaaggatctacaatattcatgaatcttagtggccttgcgatagccaaaaaaaaagttaaacatcactcagaaagcactgattataaaaaatattccatccattggactcataaaaatttagttgtgtcaatcaaaacatactaaccattaagatagttaaagagaaaaccaagagtgggacaggatatttgcaatacttgcatcagacaaatgactccagaatatttaaagagattctggaaatcaataaaaaaagataaacaacctattttttatgggcaaataatcgaatgggaatttctcaaaagaggatatccaatatccaagactattattcatgctgaaaggttcttagtataattgttaatcagggaaatacaagttaaagaacatgacgagatatcggtgcacacccaccagaaaggaataaatctgtagaatttctaaatgaatcttatcccttagctcaacttgttgcagcatccctggcaaaccttaaggagggctccgttaatccccatgttgcaaaatgaatttgcatattttggaatttaattatataaacagaaaaatataaatattagagcttttcttaaactcaaaaccgtatttccctcaagtgatacaggagtgacatttcctacgttttaaagtagcaggactgcgttttcctgtagtgctaacatgggataagacttgatttctagatctcaaattacagctttaaaattccttttcctaatgcatgctgatctttcttttctgagagttttttttccacaatctttctcattgtattttttttccctcaaatcaagcccagtgctggtaaattagtgagatgtgtgtctcttggagcttagcaaactggcgagaggcttgtctttgtcttccttcttcttcaggtctccatttcagaacctcattgtcttctaaactcgatgctgaaattaacttctttaatttattgcttttattaagtagagcttgtatattttattcaaaatttttaaaagattagaacattttacatacctttctaacagataaaattgcttttcatttatatgacctttaattaaattgatgtgcatcagtgttgcttggcagaaaaattttcccatctttgattaaaagacaaactaaatgatcatcatccttagttctggagcaagaggaagaaatatcctggacattatttggggagagggatgcagactaagttccccaggcccctcactgcactcagctcagttccccatatctgtaagctgctctctggacatcctctgtccccaccttaggaaagggaaagtactacctccacacacacacatacacacaaacacataccacacacacaccacacacaccacacaaacacatactatataccatacacaccacacacaccacacaaacacatactatataccatacacaccacacacaccacacaaacacacacacaaacaccacataccacacacacaccacacaaacacataccacatacacacaagcacatacacacaccacacaaacacacacacaaacaccacataccacacacacaccacacaaacacacaccacacatgcacacaaacgtcacataccacacacacagacatacacacacaaagacacacacacacaccaccacacaccccccacacactgcataccacacacaccacacaaacacacatacaaataccacatatcatacacaccacaaaaacacataccacatacaagtgcacacacacaccacataacacacacaccacacatgcacacagacaaacaccacataccacacacacaccacacgaacacgcaccacacacacaaacatcacataccacacacacacagacatacataaagacacacacacaccaccacataccccacacacactacataccacacacacacaccacataccacacacacataaacaccacctaccacatacacacaccacatacccccacacacgctacttatcacacacaccacacaaacacacaccacataccacacacacaccacataccacacacacaccacacatacccccccacaagcacacactacataccactacatgccacacacatcacacagcacaccatacaaacacatagcacactacatacacatctcacacacacatacaccccacacacaaacacacatcatataccacacaccacacacacacaaacacacacacaccctccacacacacacaaacacacaccatatattatacacaccacacatgcaccatacaaacacacacagcacaaacacacataccatacacacaccacacatactcaacacataaaacacacaccatagaaacacacacaccacacacacaaacgcacactacataccacactacatacacatcacacacacccccacacacagacacacacaccacatacaaagacacacacctcatacacaccacgtaccacactacatagacatcacacacacacccccacacacaaacacacacaccacacaccatatactacacacacacaccgcataccacacacaccatacaaacacaacaccacacaaatgcacacaccctacacacatcagacatactcacaccacacacacacctcataccacacatacaccacacacacaccacataccacacatacatcacacacacacacacaccactgcccacatacaaacacacaccaaacacacacacgactcaccacataccacacatacaccacatacacacaagcacgtacatcacacacaaaaacccacaccacatgcaccacatatcacacacaccatacaaatacacacactacacacaaacccacactcacactgcacacacacgcgcacgcacacacacacgcacacactcatactgcacacacacacattcattagaatgaaaagagaaaagttatctgagtaccttggtgcttcccctcaagcgtctttatttccctgtttcctttacaatttgaagatggccctaacacaggctgagggggtgatcctgtggtgacaggatcctgtaggagaaggtcatcagtcctgcagcaatcctgcagcagcatctccagaaatgtgggggctttgtttgcccagttgaccaatacagtggaagagacaagcttgaaaagatcccttcctgagaagggtgggacagaaaccactgctccacagccctgaagaaaagctgaggcaggtgccgagtgaccaaggggtgcaggctctggagtcaccacttgggagttggagccactttccagcaacgtatcctctccaagtctccatttcttccccagtaaaatgacacatgggttaaatgagagagagggtggggatgtggcctgtaggatataaatccatgcaaaggactgtctgccatttgtatcagagaccacaccaagaatgagagatgagaggaggggattttctaatgtataacagccaacaggaacgaagctacggagctggagaagagttggcgctggagggacgaagccttgaggtgattgctgaggacctagctttccagagctctaacaagacagcagcttgaaggcctaaagttgctccaaaccttgcttggccctttgaatgccagaatgctcctgaggatgaagcatcaataggtcaggaaactggcttctgctttctgtctgcaaggacacagtgggggtctggccagccaaggctgcaagccacaggattgctgtcgcgggacagcaggaagcacctcaacaggcaggactgggtttccttgaaggctctgtcacttgtttaggaagaacttaagttattccatcccagctctgtcagggtctcaagggtctcctttcctaggtaaaagcatctttccccacttgttagagaccatccatcctggtagcatcccctaaatattcatgtagtagaccccctaggggcagatttatggggaaaatatgtgttagcaaaaaaattctaaagagtttcaaattatggaacattgtacaaaatgcgtgtgcttatcaggagatgcagcctttccagatatccctgaagaaactaattttcttctgaaaagagctcgattgggaaagtcctacagtttctgttttcctagaggaaatgaccaacagtatgacgatgctttgtcttctctgccttcaggccttcatcagtagaaagagtcttcccatggaaacacacattaaatagaaacatttactctgtatttcatctgtgtgttattttacacagatgtatctggacccggattgcaatggttgaaggaaaaaactcaagtattttgtgaatgtcatagaacagcgggtgatatttttatctatttttccaaattctgtaacatattgtctttacagttcaaaagaaatattatgatcacgcttgtttagtttagagaatctgagtgtgcaatgcattcagttcagaggactgatcttctagcttgtcgcactttctctgcattattgtgggaactgtggtcctggcagcctcctctagctgatgctgtggcagtctagcggacaagagcaacatcatcacaaatgggaaaacatgaggtttgatttgaagaagcttcccatgaatatgactaaggcttacactgctgagcagaaaatcatacaaggttaaaatttttacagaattgatgtcaaaactcacagtgagccaaatacctaaacacagttgaccattgagcaacatggcagttaggggtggcaactcaactccccacgcagtcaaaaatctgtgtataacttttgattccccacaacttaactactcatagcatactattgaccagaagccttgccgataatacacacagtcggttaacaaatattttgtatgttaaatgtattatatactgtgttcttacaataaaaaaaaagttactaagaaaatcacaaggaagataaatatatttactattctctaagtggaagtggatcatcattaagatcttggttctcatcatcacgttgagtaggctgaggaggaggaggaagaggaggggttggccttgctgtctcagagatgacaagagatgaaggaggtggaggagttggaaggggagacagaagaggcaggcacactttgtgtaaacttcattgaaaaaaacttcgtccgggcacggaggctcacgcctgtaatcccagcactttgggaggctgaggcaggaggaacacaaggtcaggagatcaagaccatcctggccaacatggtgaagccccttctctactaaaatacaaaaaatcagccgggcatggtggtgcgtgcttgtagtctcagctactcagaaggctgaggcaggggaatcgcttgaacccaggaggcagaggttgcagtgagccaagatcgtgccactgcactcaagcctggtgacagagcaagagtccgtctcagcaacaacaacaacaaaaacagaaaagaaaagaaaagaaaaaatctgcatataagggtcaactgtacagcatttttaaaggcagaaactaagatctactgataatctacactgtcagacacgttttattctctttttaaatattcacacaactctccatcaccctcacatgacttataaggctcaaaagagggaggtgactaatgagtagtaggattcggagtatagaaactgagtatctgtgatattccacctgctatttgaagaatactgagaaattctttccgtaactcttgttgtcatttgtatgtcttctttggtgagggtctcttcagatcttctgctcattttttaattgaatagtttgtttcccaattgttgaatttaaagagttctttgtatactttggattcaagtgctttggcagatatgtgctttgcaaatatttttttcccagtgtgtgtcttctttttatttattattattattatttttttgagacagcgttttgctcttgtcacccaggctggagtgcaatgacatgaactcggctcactgcaacctcctcgtcccaagttcaagtgattctcctgccccagcctccagagtagctgggattacaggtgcctgccaccacacccggctaactttttgtatttttagtagagacgaggtttcaccatgttggccaggctggtctcaaactcctgacctcagatgatccacccgctttggcctccccaagtgctaggattataggcatgacccaccatgcccagcctgtgtcttgtttcattctattgctagtgtttatagatcaaggtgggaagaattaacattttaagaatgttaagccttccaatccaaggacatgcaatccagtttacttcatttgattttttcataaaagattgtctttttccacacacagattttgtaatactttaagtttatgccacagaattacaattttttttcttttatgtctttctttcttgctcttctatttttttccttttgtgtgtgtgtgctattctgtgctagttcctagggctgctataacaaggtaccacaaacttggtggcttaaacaacagaaacttattgtcttaccgttctggaggccggaaacccaaaatccaggtgctagcagggttgatttcttctgagggctgtgagagaaggctctgtctcatgcctgttttctagttgctggaagctgcaggtgttccctgccttgtagattgactactccctgtgttttcacatcttctctctgtgcctggctctgtctctacacacgctgttctttctagtaggacagcagtcacattggattaggggcctaccttgtcttgtagaacctcattttagctaatcatatctgtaattgccctatttccaaataaggtcacattatgaagtactggggggttagaacatcaacatatttttttggaagggggggaaaattcaatgcataacttaatgtaaatgatttatttgtattttaaatatcacatgttcattgctaatatagacacaaacaactgaatgttatatgtttactttgtgtcctatggcttactatatttattattagctccaggagttttttgtcaattctttgggattttctacatagacaatcatgtcatctctaaataaagacagtgttatttctccttctccaatgtataacttctatttcctttttctagcactagctacaacttccagtacaatgaagaagtggcgaggaaggacattattgccatgttcctgatattagtggttaagggtccaggttcttatcattagctaagatgttagctgtaggtttttttttttaacgttttattattaaggtaaggaagactctcctatttctccttgtgtggattttagtaaattatgtctttcaaaaaattggtccatttcttctaagtgatcaaatttatgggctagagtcattcgtagtattccttttaatgtccatagatcaatagtaatgatccttcttttatttctggtgttgatattttttgtcttttcttgattttcatagctagaggtttatcaatttattgatattttcaaagaaatagcttttagttttattgatttttctctatcatttttgcattcaaaacatccttgatttttgctctaatttttattttttttcttctgcttgttttaggattaaattacccttctttctctagttttctaagatgaaaacctaggttgttgactctagatctttatgcctttctaacatatacatttaatgctatgaatttctctcaaagcactgcttttgctgcatccaactaattttgattaatagtattttattttcatttagatcaaaatatttaatttctatgagactttttctttgaccaatgtacaattttggcttttgttgcttaatttccaaatatttagggattttccagctctctttctgttattgatttctagtttcattccaatgtagtttaaaaacatactccaaaggatttctattgttttacaattttaaggagagttttatggccctgatgtagtctgccatggtaaagatgaatttaggaagaatatgtactctgctgtttttgggtggagtattctatacatgtcaactaaataaagctaattataaagctgttcagatcatctatatcctcacatatcttctctgcctgcttaatctaccaagtactgacaaaggaacattgaagcctccaactaaataatcaatatgtctttttctcctttcaattctgtcagttttggctacacatacttggacactctgttgtgagatttatacatatgaaggatttttatgctgggttttttttttttttgcagaattaacccatttatcattaagtgatactcctcactatctctgataattttccatattttgaaattgactttgcctgaaactaatatatctactttagctttcttttggttaattttagaataatatatcttgtttcagctctttaacttccctgagtctttaaatttagagacttgtgtcttatttttaatccaccctgacaatctctgtcctttaattatatgtagactattcatattaaagtgactattgatacagttggattaatagctaccatgtttgcagctgttttctacctgttgcacttctggtgtctttatctcatctccttttctgcctacattagttttagttgagcattttatgcaaacgatttttttctcctctcttagcatatcaattatccttattttatttatttatttatttatttatttatttatttatttatttatttttgagacagagtctcactctgtcgcccaggctggagtgcagtggtgcaatctcagctcactgcagcctctgcctcctgggttcaagtgattctcctgcctcagccacccgagtagctgagactacaggcaagcgccatcacactcggctaatttttttgtatttttagtagagaaggggttttaccatgctggccaggatggtcttgatctcctgacctcgtgatccacccacctcggcctcccaaagttctgggattacaggtgtgagccgccccgccaattatccttattttttttaaataggttttgcaccagagtttgaaatatacattttaattagcctaagtccaccttcaaataatagtacgctacttcacaagtagtgctgataccttataacagagtattcctaattctttcctcccattctttgtgacattgttataattcattcatttatccatacgctatactcacttaatacattattgctattattattttaagcagtgagccgagatcgtgcttttagatgaagtataaataagaaaaatcaaagtttcaattttttcttcatttattctttctccaatgttctttttattcatgtaaatcctggtttctgacctatgtcatcttatttctttatagagaaattattttaacatttcttacaggaaaggtctatgtactagtgataaatttcctcagtttttgtttctttgagaaaacttctatttctcctcacttttgaaggataattttgttggatatagaattctaggttggcattttgtttttgtttttttcttccaaaacctaaaatattttatttactccattttcttcccgctttcatggtttctgatgaaaagtccactgtaattcttatctttgttcctttataggtaaaattatttctttttcctctgactgcttgcaacattttctctatatctttgcttttctgtagcttaaatggtagatatgcataggtgtagatattttgggagctttctggatctgtgtttaggtgtctgtcattcattttgaaaactcagccattatcacttcaaatatttcttcttttcagttctctctctcttttccttttggtgtttcaattatgtgtctgtcataccttttgaagttatctcacagttcttggatgttctgttctttctgttccttcttgttgttgttcattctctttccctttgcatttcagatgggaagtttctattaacttatgttcaggttcactaatgcgttcctccacctgtccagtctactgatgagcctgtcaaaagcattctttacttctgttataatgttttgtttctatttttaaaattttatttattcatttatttattttgagacagagtccagagtcactctgttgcccaggctagagtgcagtggcatgatctcggctcagtgcaacctctgcttccaggttcaagtgattctagtgcctcagcctcccaagtagctgggattacaggtgtcagccaccaaagccagctaatttttgtatttttggtagagacagagtttcactgtgttagccaagctggtcttgaacgcctgacctcaagtgatctgctcgccttggcctcccaaagtgctgggattacaggtgtgggccaccatgcccagcctacagtgttttgctttttaacattacttttttatttgttctttgagttttcatctgtctgcttacatgactcacctgttcttgcatgttgtctaatttttccattagaggcttcagcgtattaatcaaagttattttaaatctcgtctgataactctaatatctgtcatctatgagtctgattctgatgcttcagaccccttagtctcttcaaactatttttttccttttaaaatttcatgtaaatctatggtgaaagctggatgtaacatatccagtaacaggcaatgaggtaagtaggtctgaagtgctaggttttaagttaatctggctgagagttgcactgtgtttaatgcttgctgtagctgtaggtgccggaggtgtcagattcctccagcacccttgtttttgtcctcccctgatgtcctagtgcttccctgagaacctttccttagaagagcctgtgccttgcagcagtctcagctccaagccagtcctgatgccctggaaccctgttgccatggaggtaatatgaggaggggcattctaaaatcttattaataggattaaaaccgagtgtctttttggcctttagacttggctgtgatattcacaagcatgtcttaggtattttcctccctgaagtgctacaggaaggctagaaggagcccccagattgggataaggctctaacgaagcatttccccttgctggtggggccttagttatggagaataccctggatatacttcagaatggttacttttcccctccctttgccaaagacaacaagattttccttggctcttcgatgtgagaacctggtagcattcctagaggtaaagcctacaaaaatatggagccccctaagactgcagtcctaggaatttcctaccctcacaccggtccatactcagcttccagcaatccaacaacattaccagttacatgctcctacctcatggtgccagtgacatctgctccagacaagcagatctgggtggctacatctttctagtgctctgatggattgaaaagagctttttgatttttagcttttttagctcttttcttgttggaaggatgggagtaatgactttcaaactctttacattttgaagctgaaactagaaatcctggatatattttttaaggttaaaaaaaataggcttccagtcatgctggatatggaggtgagaaaaaagaaattgattggaaatttttagttataatgatcaaaagttgcattcaccatacacactgtttgtggcctataagcgttacctggtgttggaaaaacagtccattacatgttattcctcagcttgcttctgaattcagaggccctgagccagttaagctggtattatttccattacgaggtggcacagcaaacactgtgtgcgtctgggttcagaattactttgcccttcagaattacccaagggaaatcttgagaaaaataccttctaaatgggtaattttaacagtgctgtgttataaacatttccttggctccaagtcaggcactctgcagctttcggcagctactgggtctgagatgctgtttctgctgtttgaagcttactgtctccatgttacagacaacagcctgcagccccagggatgccaaggtactggcaaactttgggaatgaacatttagtggaggaggcctacacctaaccctattaggagctacttgcccacttatggggcacaaacaggtctggattttaatccaggctctggactaagatataactcctttgcctgtgttttggatctgtaaagtaggcgtagtcataattttgtcttttgtgtgttggggggggagagagggtctcactgtcgcccaggctggagtgcaacctctgcttcccgggctccagcttcagcctcctgagtagctgggactacaggcttgcaccaccaataccccgttaatttttgtgttttttgtagagatggggtttcatcatgttgcccaggctggtctcgaactcctgagctcaaagcaatttgcccgcctcagcctcctgacgtgctggaattacaggcgtgagccaccacatctggccataattgtgtcttaatgataatgaaatttagccctgatgcatgtaacataagtgcccaatcaatacagacttgccatttgggttgttcactgctgccaacttcatggttttataaaagttctaccacaaagattgcacgttttacttctaattaatgatccctgtggagacaaaagtgggtccctcttggatgctaacccaccatgttgatgtctcatagccccagtcccatgaatgcctcctggtttctactttatctactgtccctggtgtaagaacgtgtcaacctggacattaccgcacaaactagaggcgatggcgcacgtgacattcttgctgtcctggagagttgtctttgttttgcgggagcacgtacaccctttccctgtggtacgtaagccccacgtctggggactaacagtgcagagagccacctgtcttgtggccacccagggccacgcttccatgtgtaagttccccgatacatcaactaataccgacaaactggatttgtctgcctccttctttggtttctctgatcctttggcatttggaggtcatttcccatatgaggcccttccaggaaacaatccctgagagatttcctaggttacagttggggctttcttgccatggatctaattagccatgttgtcctgtgacctgcgactatggacagttgatggttcaaagcatgggttctggttggctgagttctcagaggcccctttttttgcatatgaaattactctcctcctctgtatgagatggcattcaaaacctcactcttttattctagaaatatttctgtgctgtgttgagttctactgacacagtggttaacaaaacagatatgaacctcctctcacaaagcttacagtctatagaggaggaaagattcttactctaatctcaccaacaccatatgcagcaggggttaggggtgcaaaaacacagtgtgaaccagggaggtcacgagaacacagggaatggggagtggactatgcttggtgtcaggaatgctttccagaagaaatttctttgggcctgagacactgaaggatggcagagaagctcagttgaggggggcaagatggaaacccaggggcgggtcactatgtcagcaaagcactggcaaacacattttctaaatgaccccctagaaaatgttctcagcttggcagaccctatctgtcacaaccactcaactctgtcattacagccgaagccttagacaataaggaaagccatggaagtggctgggttccaataaaactttatttatggatgctaaactcgaattttgtattatttttgtatgtctgtcacgaggtattctttttggttttttttccaaccatttaaaaatgtaaaaactattctcagctcacaggtggcaccaaaacagtgaacaagatttggcccttagcctgcagacccctgggggaagccagcgagggtgacatggacagaagagttcagtagggcgaaagtcctgaaaatatgaaggctaagcacgatgagccacccaggagcacgccttcttccttgcaatagatgctgcacactgaaactgccatttgtaaactattaaatgccacacaaacatgaggcattctattacagttgtctatgatcttatcaaatgtgaattttggggccaggaaaagggcatctaagttacctaatctgcatgtaagaaaaatgcacaaatacctaaggtcaaggaaactaagatcaaatcattcttaggagacctcattttagactagggaggagtcatcaccgcttctctgttgatgaacatgtcttccggttcagactacttaaaaattcattctcagttgctaatgaatatccattggcaaaatatgaagaatcctatgacaacattctttctgtacagaagaaaagcttggggagtctgtatacactttcattaaagcaacaattgaggtgtcaagtcacaggtctttgcttcattaactttcatattcagcagctagtgagactggaagaacggatattcctttggaggtaaacagtggcggacaaattagataggactcctccctcacagaggcagagacagacactgaataattacacaaaatgacatattttcataacaaagacgggtgccatcaagggaaagcagaaaaaactgtaaatcaacaggcctatcgtttcatttgggaggttgggatggtttctttgtctctgtggacaggacatttaagccatgaccaaaagggggaacagacattttctaagtgtagagagaggaaaagtgtgtgtgtgtgtgtgtgtgattgtgcacgtgtgtatgcgtatatatgcatggtgtgatagagtgtgcatgtgtgcacatgtgtgtgtttgcatgcacatgctcctatatgtggatgtctgtgcactggagaccaggacaggaaaggaactgtattccaaacacaggtaacagtgtgtgcaaagactcagaaatgctgaagcagtaaaggacttaatgatatttgaaaaaatcaacaatggcctttggggccacatattacataatacactgagacatgcggtcaaagtcaaggctaagatgccaacaggggtggctccccaggaccttgcaggctctgatgcgagtgtggattttattctttgtgccaaggagagtctctgggggggtttcaagcaggagagcatcactctgtgatttctattttacagggggataagtgaagggccggcatcatgaatgaatctgggtttccaaggacttgctagattcaaggatgttccctcatacatacaatatagcttcagctgaaggtcctttgggctccagtttcacttcttggcatatccagcacagcaagagagtgacagtcaccagccagaagggagcacacgtgatctgaggccctgtgctgtgagtgtgggactgcacttggcgccatgagagagtacagtgatggatgtggtctccgtgcccatccttgtctgaagctgcagactattcaggggataactctgccatgtgtggtttcgaaatacatgcaacttggagaggcagtatttcgtgtttcaagagaatgcagtggggcattttattgaaaggtattttttttctcatcatgtaaaataaattaacatggtgttgcatggtttctataaaacacccgtgcatgttcgaatcaactttgcttgttacctgaattattttctctacacttctcccctctgcttaattcatttgcaaaagacaggacgtaaggaaaacatgcaccaggtaagagactatttctattgaagtcagcgagagttcttttaatttattgccagaactctgaatatcacactggttttgctgaaaaagaaagtgaaaatgtctaactatgaacaaagaaagtacagttttctcactaaatttacatatcatgtatttgaacataagtacagggatttgatttggcatggactcagggagagctccacgtaagaatattctgagtggatgttctgcccttctcgttcctcccaaccccctcctaggtgcatggtgtctgacccaaggcagaagtagaagaacacctgctggccgtgggctgcctctgccattctgctcatccaaagtgatagaaccaaacctgactttggtaacttttgcttaatgcctatatgagttttctttctttttctttggatttatttattatttatttttaccatttagaaaaaaaatggtaatatttattgagcatctccagtgtgttaaatgctttcactatatgttttcttttctttttgttttctgagttttccagggctgctgtaacaaagcaccacagactaattaacttaagcagcaggcatttcttctctcacagttctggaggctggagtccaggatggaggtgtcggcaggactgagcctctctccttggtttgcagatatcttccctgtgccttcacagtgtcatccctctgtgcctgtctgtgtcctcaagttcccttgttataaggacaccagtgggattggatcagggcctactctaatgatctaattttaccttaattaactttttaaagaccttatctctaaatgcagccacgctctgagatcttgggggttagggctccaacagatggatttggggaacacaacgtagcccctaacatgccaaacaaaaaggaagacacactggcatggggacaggaggtgagtgggaagaactggtgctcccgagagggagtgggctgggaaaggcagaagaggtgacagtgtgaagctgctccttggggacttctgggtctacccacgagtggatgccctgcagaaactgagaaggggatgggtgagaggacaattggcttcacagaatccagggcccctctagcaccctaaacaccaaacaaacaatgaaggaccaagcgggagatgctggctggcaccctgactgcgtgcttctggcgtgcccattaggagagaggagagcagaggatcgtgcaaagacacttttttatcactgggggaaccatgcattcactgagaaatgagttgttcttccagaattctgtccttgtgacaggtaacataactgtcatgtgagtaacagacttcatcttggcagatgtgacaccacatgggagcccacatggtataatagtgcagatacctataacgtgcgtattgggagtttgtgaagcatatatactgggcatggctgaaatccagagttcagtaaaagaaaaaaaaaagggagagggcaggaagttaatggaaaatgtgtaatgtgaatattgacccaacagacctctaaaaatataagctccatttcttaccaaggaattttcttttctctttggagaggacgtggcaacaacgacatctcatgcttacacgagctgccccactgttctgtgagccttggtgttgtagttacttacagcttgcaccaaccctatgaagaggccctttactgtccacattctgtataaaaggaaacagatcctgagaggtaagtgtcacccaacaagcaagtagagagaaaaggtttcaccgtctggcctctggatgggagctcttcacctccacgctacaggccaccatgtggtctggcattggcctgggtgtcaggcagcgccctgtgcaatctctggccctgccatagccagttatgtaaattcttagagactcgatttgctcatctgtcacatgtggaaagaggaagcattcatctcccaggactgctgtgagagtcaaaagcgaaatacgtagcagagctggcccttagtaaatgactaacacgtggtacctcttcttgcaagaagcgagagcctgagttgtgtgttcaaaattgtcatcactcttgctctctgtgagtgcagccaggacaaacacagtcagggcttcaatggtgcacgtggagcctgttagaaataaacaaaagacataaagctggtaacagaggcacctctttctgcctgagtggggcaggtcctcatggttctcatcagcccaaggctctgactccccacctttcaaagctgccacccaagtttacaaactctttttattttcacctatgccatcaataaatcatccccagcttttctcaagaaacctgccattgggtgcgacgttgctatgagactctcaagtagacacacaaacggggccaccaagctgagtggcaggcttgggatgattaaaaccactgtctccctgagtgttttaaaaagagcaaattgtaaaaaataaccaccttcctcacaccgagtctggaaattacatcaagagctgatcaggagatggattctcaggacctacaggaaaatttagaaaatctcaaggaaaaagctcatcatgcaagctacatatatagaaaatagccccattaaagttttttttgagagcatgacaaggaattaatgagtcaaccaagggtgtcttgcagatgtgttcaaaacacaagccagtaccaggaaatactaggtgggagccgtgtagcctgagactcttcagatcatggaagagaagtgctggcttattgccagttgatctctgataacagccaagccctgcatgataagtcacagatatccccatgagagatgcaaaagcttttctttttttaatttttaatttaagaatttaatccatatatcccttattataagaaaaagaagggttttttaaaaatatgagtgtaagtttttcatgagttccaagggttttgtttgtttggttggtttttgtttctgttttttcataacagccagtaagacaagagtctcgttagaactggcagacgtgcagctctcccaagacgttgcttctgctggaaagcccgtgctgctctggatggcggagccatgaacaggaaaagtggatggtgtgatgaaggcatcccccaaatccctaaagaaacagcacaaaagtctgccccataattatttctgcctgcttccagggtatgggaaaatcgtgtctcaatatctggaagagaacttgactaaaagctattttataaataaatacatatatgtaaaattatatgtatgtgcccacacatatgtgcatgtacgtgtatatgcgtgcatgtatgtcgatggatggacggatggttcgatagaaaccataaagctggcattttcagaagctgggaatacaagaaccaggtgtgctggatctaaaggcaaaaaccacgagagcaagcttagctctaatcaaagccaaggttcacaggggatctggtaaagaatggtcccagaaacctgagaagcagctttatacagccgactcaaaacaggggtgtggccccagagctacagaaaacaccggagaagccagattctggggtctcaaactcaaatgcctgcagggtctggggcggactctgaactggaagggagaggctccgcagctccgggatggccactgctccatccagagtacagatcttcccatctttgaagaaaagaaagaaaggtagctattacaatctatcagtttttaaatgttggctgaatttgtaaaaggggaggggacacacaaaactcttatgcagttcatacccatttccgcagcgggtattgactgcactcttcatgatgtcgctggaacccagcacctgaagctgaccgcagagcccctagactggtggaggtagagaaggtcgttgcttccatgacatgggggcgctcgccaggcgtgcagggtggggacccctggcagggatgaaggaaggcaggcctccccgaggacatgcaggggccggcggggcaaggctgggagcgctgaggccaccccgtgaccactgaggaggatgtgggggcttgggaactgagggagcctctgagctgaaatgggatcctttcccaccccaaccacgcctccctacacttcttagacacaggcagtcctgcttccggggagatccccaggtccttttgttcacaggctggacccatctgtctctcttttctcttgtcatttttgtaagacatcagagctttatttgtcctcttcattcaaacacattttccaaaactatcacttatttttaaattttgttcctggcttttttctgcaatgaatgttcatatagactgtgatgtgcgtttctatcaccccataacttttcagttttctttgttaacaatgtctcctcacccttaaaattgcttttacaatttttagtgatttttttaagcatatgtccctaatccatctgcaatttatttttggattcgatctgacatagcgggtccaacgttctatttttccagatggacaaccgggaagttatgccagcatcacttttcagacaagccaacttttctaaataaaacgtcgattctacttttatcatgaatttaattttcttatgtattagaatctatttctggatcctctattctattaattaattcatctgttcctacactaaaacaatattgatttgattaccttcaatgtgtagtgtaaatttccttcactaatgttctaattgttttccaggaaattttcaggcttccccccaccgcctgcaatatgatcatttaattctattccaaaaaaaacatcctgttgggattgcaattttgacacacgtgatatttttacgacgttatgcgttcccgcccaagaacacacttggtcattcatccactcaaggctcattcaccagagtcctgacagtgccgaggcctgcacctgcagagccccggagccctccagcccggggagggaaccgagttccagtggggagcgggtagagccggtgcagcccttcatttcacaacccctgtagcctgcctggcctgagaggaggtcatcggatgcactgagtgaactgctcaccaggtccaggctccagatcccatagatgactcaggagagaggcacggagcacctcggaagcccgggagcaccccagtccaccagctcaccatgaccaccaccctcacgctcacacacacacagcctcacacacatagtcacttacacgctctctcacacacatattctcactcacataccctcaaacacacacggcctcacacacatctgctcacacatttactcacacacatacactcacacacatactctcacacacactctcagacctatacactcacacacccacacacattcactcacacaccctcaaacacatactctcacacactcacacacaccctacactctctcacacacacacacacacacacacacttgcagacccaatacactcacacagactcacacacgcccacacacaaattcactcacacacaccttcacacactcttatactctcacacacattctcaagcactcacacacactctcacacacatacactcacacacactctcatatcatacccacacatattcacactcacacacgcactcacacacatacccaacacaaactcacacacaaatacacattcacatctcccacccccactcaaacacaaatatacacatacacgctcacacacactacacacacattctccacccccactcaaacacaaatataagcatacacatgtgcacacttacaccacctgcacatacactcacacgcccaacacacacacattccccactcacactcaaacgtaaatacacacagatacacacacactcccatacactcacatatgcttgtacacacacactcacacaatccccacattcacacaaagacattcacacataccacatacacagtcacacccccacacacactcaggcacatgcacacatacacattcacatagccccccactcacgcatataaactcacacacactcacactcatacacacacactgactgaatcttggaattcaaaactcggacaccgattccttttccttaaagccattatccctagataaatgaaaggttctcagaatgaatagcatttcccagcacattgtaaatttcctcaatgtgagtgacttcatcaggccccattatgagaggagcttgctagagaggtagaaagggagatgggaagtggaggcaggatctgagatccctgtgggaagttctgaaagaggatgtctaggcaaaaagaaatgaggagacgaaagtctgtggcatcgaggacaaatcgagtcaatctcctgatttggtggcctccaccctgtccgccggatgcttacccacattgctgcaatcgttctttcataacaggaggcaatgtgcctttccttaaaaggccaggtaagtaaatattttaggctttcagggccaagagggaatatggaggattgtgcataggaacttacagaatcatttcaaatttcaccattcaaaaaggcaaaaaccattctcagcttgcaggctgcaagaaaacaggcagctggccaaacttggccatggcctgcagtttgatgatccttgctctagaaccttccccaaatattgttcatagaattccagaaaccaatgctgcggtcccactaaagtgttgataagcacttatgcacataaaaacttgatttctgtaaacagttacatacacaccacacatgggcactatacataggaaaagacaccctgaaccctatcatatggacccagaatggccaagtcatatagtccagtaaaagtactagacttaaaaaatgtatttggacatctacacaaacaagcaagtgctttatagctttataaggggaaataaagtattagcatcaggctttttgacagcaatggtttagccataagaaaatggagtagcatttaaaatatgaaagaaaatgtaagcctcaggtttagagccaacaaactgacttccatacataaatgacacagaaaaactgttatcagcatgtgtgagcccttcttgagggacttgctaaggaattaacttcagaaaaccagaatatctagtgaggcaccaataaaggtactggttgcaagctttaaatagttacttgaataactaagtctcaataatgtggattaaaacagaaagagcatggtatgtattgctctgtgccctggcaaaatatatataatgttaccgaaaaatggggccaaaatgagtacaacatccacaaaacaatttaatgctttcattaatgataccggcagtgatagcatttgtattgttattctgagacttttgtgtgtaaggtggaatgaacaaacaagcaattatgggatattttatcattcccatgtcattgagaaccagggttcttaatcggaagaaagaagattcaaatgtagaatgggagaagcttggtaaacaccccggagtttacagttctattttgaatccaaagggtcagcatgcacgcagaacattttgcacaggggcagaactccctgcattgtgcttcacctttactgcacttctcagacactgcacttttcacaaactgaaggtttgtgaaaactataaactaaactgtactgtctagggattcatacgagaggataaaattgtaaagaaatacaaaaaaattattacaataaaaatcaggggaggccagaagtggtggctcatacctataatcccagcatttgggatgccaacacagagagactacttgaggccaggagtttgagaccagcctgggcaacatagcaggaccccatctctacaaaataaaattaaaattaaaaaatcaactgggagtggtggtatgtgcctgtaaaaccacctacttcaggaggctgaggcaggaggatcacttgagccaaacagttcgaggctgccgtgacctatgatcatgctactgcactccagcctgggcaaaagagtgtgaccttgtctataaaataaataaataaataaataagaaggaaatccagaggagtggctacttcagggagatttggtatgattggaatggagaaactccaggaaggctagaaaagcaccatttttgacctgggtgtttgttttaagtgcgctcacattataagtaagtaatctaggcatgtgttttgtgctgtttttgtagagctcctatattttacaataaaagtttttaacaagaaaaaataacaagaaacccagtaattttcaaagttaccttccccttcaaaaaggtgatcctctggcctcagcctttcaactggttgggactacaaggacacaccaacatgcctggctaaatttttattgtttgtagaaaatgagttctctctctgttgcccaggctggttttgaactcccaggctcaagcaatcctcctaccttaatttgtttttatgtacaaattagggctaagacttcagaagaaaaaagaggataaaaaggcaggatatggctttggaggaagaatgtaaagcaaaaataattagcattatttatgtcaagccatgtgaagataatttcttactgaatcaatgtcatgatattgagggttaagatgcatatatggttaatgagaggtacttgcagccaaagtagttaacttaagcaaaaagaatagtgtgagatttaaagtttctaactacatagagtgatacatttcaaatatcagacccaaccacattttaaaagtcagagtagtctggacatggtggctcacatctgtaattccagcactttgggaggccaaggcaggtggattgcatgaggccagaagttcgagaccagcctggccaacatggaaaaccccacctctactaaaaatacaaaaattatccaggtgtggtggtgtgcagctgtagtcctagctacttgggaggctgaggcacaagaatccttaaacccaggaggcagaggttgcagtgagccaatatcgcaccactgcactccagcctgggtaacagagtaatactttgtcataaaataaaataaaataaaaatagaagtcagactatatattccagaaatttggaccttctactatagttgctgatagacttgcaaatcctatgatttgcaaattggcttacaatttggcttcatagtgattagtccaacaggatcattgaattaggcctgtctattcttagtcatggctgaaactcagttgattttcaacactatcactctcagcaatcaatattttgtcttatacattttacttgaaatatttatatgaaaaggaatatgtaataactttttatactgaaggttcatactcacagttaaatacatttctagttagttgagcaggtgttctactcatggctaaggctgaagggtttgctcaagccatatgccctttgagagaagcaggccagcaggaccaaagtgtgcttgagctaccagcaatccaatttaccctattgtctccttggattaagcgtcggttctgctagcccaggcacatagttgaattgaattaacaaggttattcaaagcctgaaatcactatgatagaggaatgttgtttattgggtaaccttattccttattttaaattagatttttttgtttttccaaggtaaattaaaatgctttattaaaataaataaaacattcttaagagcctctcagattacaaacacagcacacatacaagagacctgtatttcctggatctctgtccaagggccaaacccacactttaggacacagatttctagggcccctactacagagaacagtcttgttgcctctgagactacaaataagcttcacccagtaggatgtgaaggtggaagcaaggactcagaaatagaagacgaaaatgtggaaacaagccaggtggaattagatcatatagtgcagaggaaaatactagggcaactttaaataaaccctttgtaaactctggggagaaaatgtgcaatgaaggtgcacttgcaggggttagctttttatattttttaggtctgaccatgaataaagcttctgaagagcagaagtggagcaagaaaactcaagctgaaggcgctcagaagcaggaagaatctcagtggtcacccagtccatcctggccccagcccaccactcatgcagcagacatgaattctttgcacagcctctcaggcaagctgtcagtcagttgctgaagaataaagatagggatctcggagactaaaaggcaaacaggtcctgatcaggcactggaaaaattgatgaatgaagtcagtcttcgtggttcccaagttccctcctctctgtcctttctcctctgcagaacaactgctacactttttctttggcccagtattgacttatatcctggctgtgggactttgtagttaattagagtttcataatgggatgtgccgccttgtgtgataacaagcttcctgtcatgggaagcaaccaagccaaagctgcatgaccatgaaccaggaacactgcagaagtgtgtggaacgggaaagcagaactgaggccctccactcacaaatagtaggaggctcttacagcatcagttgcagatattgctatcaattcagcaaatctttattgatcttttacaataagccaggcactgtgctgtcatcaccaggaaactgcaagctcaataagtaccaagaccatgcattctttattcagcattctagactcaacctgttgtctggaacaaagcaagtattcaacatttgtgaagtgagtgaatgaatgaatcattggtacaatgctgaataattgttaacaaggtgatacaatcaattttcttacccttcagtacctaagattgactaaatgtaaagtgggattaataatactaaccttttagggttattataagaattaaattttaaaatatagatgcctgcatttgcccatgaaagagcaattgataaagtacttgcactcttgccattaaaaataactagaaaaactggaaaaatatatgaaataaatggacattggacaatacctaccacaggactgtgatccctgattaaaggtggaaacaaacaaggtgaacacttaaggctttctgcctgaagacaatttccagaccacccactagagagagaaaacccaaacagatcccagcaacctgctcaactgtggaaaaaaaatatgtacttcaggaagctggaggcagctagaacttgtacagcagaataccagagggaaggaggctacacacacacacaaaagtggctacaaaaatctgcatcaggagcccttgaatatgaatctgcacatatctagggtgaaattccttgagactaggaaaaagaacagctgcggtaaaggaaaattatttgtggtaacaataagctgaaaaattcccagagctcacatatgactgggaagtttccaagttcccaccaagcagtgattattcattaagtacacgggacattcattacagacacaaaaagggctatgacttagtagaaggaataaactagccctagaagaaaaggctactcttgacccaattccataattaaaaaaaaaaaaaacttgaaaggatcaagcaggtctacaagtaacttaactgcctgctagaacaaagtccaacacctttaaggaatgcaacaaaatccagtactcaatagcataaaatacaatgtctaactccagtaagaaaaaaaaatactagatatgtaaacaagtggggaaatgtgaccaagaaccaaaataaagaatctatcaatgacagcaatgacagaaatgatgtaattagctgaaaaagacgtaaaagaagttattactaatattataaatatattcaaagatttaaagaaaaacataactgctaggagtgagatgaaagatattgtttaaaagaacttgtagagataaaaatatagcatttaaaattaaaaattccctgaatgaacggaagtaacaagagattagacactgcagtaaactcgaaaatatagaaatagtacctaagtaaacctgaaaatatagaaatagaacctatctaagataaaatgtatagataaaagaggggtgaaaaaaatgaaggaaatctcagtgagcagtgtgatcctatcaatcagtctcatatacagataattggtgtcctagaaacataaaacagagagtaaaaccaaaaaaaaaaaattgaaaaaataatgactctaagtttttacaaaattcaaagaaaacaaaaaaactcaaagatctaaaatctaaaaacctaaattaggctgagcatggtggttcacacttgtaatcccagcactttgggaggctgaagtgggaggatcccttgagcccaggagtttgagaccagcctgggccatatagcaagactccatctccaaaaaaaaaaaaaaaataacggagcacagtggcacacatctgtagtcctacctacttgggatgctgaggcaggaggagtgcccaggaggtaaaggatgcaataagctatgatgacccccactgcgctccagcttgggtgacagagtgagacaatctctaaaaatttttttaaacccacattaggataaacacgaaaaaaagccacaccaaggtatatcataagcaaactgctaaaaactgacgataatgagaaaagttgaaaaccagccaaagaaacacagagtatattattaagaaacaaaggtaagaaaaaggacctgatatattggcagaaaccaagcaagccagaggataatgaatcaacatcattaaagtacaaatcaaaacaaaagtgacatctcagaaattaattatacgcagcacagatgtttccaatagtaaggtaaaataaaagtgtttcaggacaaaaaaagaaaaacaagacatttcatctccagcagaccacagaagaagacatgttaaagaaagttattcaggtagaataaaaacaggaccacatggaaatctctacacaaagaaatgaacagcaccagaaattatcaatatgtgggtgaatgtaaaatagatttgtcttatattttaatttctttaaaaaatagctgtttaaaacaaaagtagtggcaatgtattctagagtttatcacatttagaagtaatatatataagaacaatagcacaaacaatgagagagagaaaatgtatatattgctatgagtttcttaaattatggcataatatcatttaaaaatagacttggatgagttgaagatgaatatttcaaatgctagagcaaccaagaaaactattttaagagcaaaactaaaaaatatctaggaagccagaagaatggctatagcaaaaaagacagacaatagcaaatactggcaagaatgtggaatatttgaaggtctcatacattgctggggagaaagtaacattgttctaacacttttgaaaaaagtttagcagtttcttacaaagttaaacatatacttatcatatgacccccaattccactcctaagaatttacccaaaaggaataaaaatgtataactccatgaagacttgtacatggatgttcatggcagctttattcataatagccaggcactgaaacaaaccaaatgtacaagagaacagataaaccaatgacgacacatacacgcaatggaaatataactcagtttaaaaagaaagaaaaatggaaggaaggaagaagggaggagaaggggaggggaggggaagggaaggaaggaaaggaaggaaggaagagagagagaaaagaaagaaaggaaggaaggaaggaaggaaggaaggaaggaagaaagaaagaaagaaagaaagaaagaaagaaagaaagaaaggagggaaggaagaaagaaaggagggaaggaaggaaaggcaggaagagagagaaaaagaaagagagagaaagaaagaaagggaaagaaggaaagaaaggaaagaaagaagaaagaaagaaagaaaggaaggaaagaagaaaggaaggaaggagaaagggtatgaactgttgatacaagcaacagcttaaatgaatcttataaacacttactaagcaaacataggctcaaggaacacatattggatgattccatacttacgaagttctaataaagatgaaagtaatgcatgatggcagaagatacagacctctgcccagacctgaagctatgaaacccagggacaacaagaacttaagtcctccctgagtgaagacagccagaatgtgcacctcctgcacatttgttacaaactgtgactcagtctcacctgtcctgcccgagaggactggtctatctccacctcaatggcctgctgagccctggtgctgatagctctgggtaggatactcaaaatgaaatttcttctctctcccttagtatcttttttgtttttgtttttgtttttaagaaatggggtcctactctgacacccaggctggaatgcagtggcatggtcatagctcactacagccttaatcttctgggctcaagcaatcgtctgcctctgcctctgcctcccaagtagcaaggatgacaggcatgcaccaccatgctcgactctcagtgtcttttaaagagatgaattgtgttcactgggagttgcttgaaattgtgttatgcagatgaaagagtttctattgcctagatgggctcattcagggagcctttgatttcagttattaagtgcagaggggcttcaagagaccccctacaaagaaatatacacttatccttccccctggaaggaatatgctcatctgaggggtcagacttggcactcagggtttccaattaagccctgattgcatgcctgagccagctacttccgaaggtaatcaaacctctctcactgttttgttgaaagtggcttaagcggaaaggaaacagcagacaagagcacaaagtcagcaggtgcatctctcagctttgaccagttcactgaactcccagagaagacctcctaatatcagagaaggaattctggggggaaaaaaataaaacagaaaagcaagcattgcttggctcacatcaagacaaaagcagcttcctttgtagcaggagagacagctgctgatgcaaatgccacatggactgtaattttggaaaacttgcctgtttgaagaggctgttgtgagagtgttgataatgcttataaagatcgagttgccttaattcatggagggccattgctagtattggggatgaaaattatttactttttagttacagaattgattgtctttattctcttttaaaatacacaaggtttttgttactcttttcttcaaggtgaccatatgtctttcaattcatggcaaggtgaccataggtcattcaatttactcagtagcttagccactaatagcccagaataggcaacatctctgccaggtttcccagccccactgggatcaggccacaggaaacaagtcctgatcctcaatgtggtgggcaaaatcacacctccctaaagaaagatgcccacattataatccctggaacctgtgaatatgttaccacgttaggcaaaagtgaatctgccgatgagattaaggatcttgagatggggaaattatcttggatcatgtgaattggaccaatataatcacaatgaccattacaagagggagaaaggagggtcagaaacacagagaggagatgtgacaatgaagcagaggtcagagtcacagagagagagagagattggaggatgctaccctgctggctttaaagatggaggaagaggacaaagccaaggaatgcagatggcttctagaagctggaaaagtagaaaaaaaacagattctcccctggatacatcagaaggaaggcagttctgctgataccttgattttaggactactgacttctaaaactaagagagtaaatgcatatatgcacatatatatatatatatatatatatatatatatatatatagagagagagagagagagagagagagagagagagagagagatggagtctcactctgtctcccaggctggagtgcaatgatgcgatcttggctcactgcagcctccacctcttgggttcaagtgattctcctgcctcagcctccctagtagctgggattacaggcacgcaccaccacacccagctaatttttgtatttttagtagagatggggtctcatgatgttggccaggctggtctcgaactcctgagctcaaatgatctgccctcctcagcctcccaaagtgctaggattacaggcgtaagccaccaagcacagccataatgcatattttttaagccactgggtttgtggaaatttttcacaacagcaataggaaactgacatacttgaggacacaaaggaaaggtacaaggaccctgaccaccctcagtggcatcagcggcctccttcatgtgggctgacggtcactgacatttagaaatacaagaaatggcctttccccacccaccagcaaggttggttacctcttctcagcctttcagtagctcattccaaacaatatgtttttgaaataggaatgccatttgtcaggcccatgctccattttggcaaaggcatagaaaaatagaaactaaacttgaggataacatttaagcttctaacagaccatattctggaagtcacacattaagtctaattggggggaaacacgtggtcctatcttccaaatatcaatgcaaatcagaagtggaccttgaagagtgaacaaaactgtgaattttctctaactggaggctgctaaagcaagaggagatgttttccccgcaggaaccaaggtctagaacatactctcttaaggtaagacttgaggaagtgatcgagatgactagaaataggaaaaatccaccttttcagactcaaaatgtgagtagacatgagttgtagagacacatagtttttctcccacatcatctgatgggtcaatatgccccaggacgtagatggtgcaagaacgtcttgtaagagaagagtgtttacagtggtatagaaacaagaacgcctcacatgcaagcagaacgtgaaggagctcaactatatgctatttctacccccagcctccctcctgtctggtgtttcacaattgggttgaaggaagttagcaggtaacctgctcaccatcaccggcttctcttctgcacactggcagacatcaccagctgatcacagtgccccactggcccaacctggccccagtcccataattctcaacacatttactagcaatcaagactagacctggactctccagataacctacatgccagtcctgaggggaagtatactatctgtggagatctcttggtccagcataaaaattgtcaaggaaaatatttgccctccaggtctttcacacagtggtacttccagttcagcaccatcaatccgtaaagaggttgcaaagtagcagggcagagacagctaaggaggcgtggacaggcttgctccatgggctgtgtccaggtccaggtgccaagtggggattcctgagcagcccaagcagggcaggatttagaaaggaaaagaagggagaacagaagagtaggaggaagccgtggaagacaagcttcccaacctcacggtttcgcccagcgccggcctcccttttaatgcagaaagtgccaggagtctctcctcccccttagccacgtgaatcctcctcttccccacatgaacctcacatgacccctagtccccagggcttgccatcacttctgttgctatggaaacctgtggcctcatccagcaacagcctcacggttttagtgagtgaaaccgtgtaaccgctgcccatcggttacaaagtctcaacagcagcccggtgcttacaggctctgctgaggtcatgatttttcattaagacttgtttgctctgttactagggagaaatggcatgcggatcccggctgaggggcacagagttcatttaatagcacctcatttagaggaaagcccaattgctgagcttttggagtgtgaacagcacaatacagtctggtaggcacctccctctggccccacctccaggtcccagagaacaacatgctccctgagaactggcagttagatctggagctagaggaaagggtgaataaaatgcctttctaagaaagctcgctcttcctcaccacatgcatgcacattcacactagactgtctttttcccctcccttctcatctggatacttgatgtcaaaggtgaatttgggggctggatcattctttacattgttgtaatattatctaattcatttctcacattggaaaactaaatacggtaaataatagcacactagggaatggatcaaaaataataatgaatgtcaaatgattgcagatattgacaatgtgtagaacaatatgcacatgaaaaggtgaaaaagcagcttatttgtgtgttggtatatatataaaatatatatattaaaaaatatataaaaaatatataaatatatatataaatatatataaaaagatatatatataaagtatatataaatacatataaaaaactagaaaataaagacatatatgtaaatatataaaactagaaaataaagacaaatatatataaaactagaaaataaagacaaaataatcacactcattaccctccctcatccttaggcaatctggcatgtatgattctcaaaatttatatatatgtatatatataaaatatacatatattttatatgtatatatatacacatatataatatacatatattttatgtacatatattttatatattttatatgtatatatacacacatatataatatacatatatataaaatataagtaagtatagcagttagctgctgctttgtaacaaattacccaaggatgcagtggcttaaaacaacattcagttatttaactcatgattaggtggggctgggctcatctgatctcggctgggctcacttgtgcatctgcatgtcagcttctggtttggttggggactggctcatataaaatggcctcagcaggaatgagtcacctctgctccacatgatctctcatcctgtagcaggctggcctgtagcatgaaagctacaggactccagaaccactggagataagcaagttctcttgaggtttatgcttggctctcaagtactatgacggtggctgccacattctatgggtcaaagcaagtcacaaggcccacacagattcaagatatggggaagtagactccacctcttaatgagagaagctacaaagtcacactcaaaagtatgtgcataacagagagtgaaggatttggcccatttgttttgcaagttactccagagaaaaagtcagaaaaccatttttgctttgagtaattcagcttaactaggaaagtggattgagtgatcaccacatgggaacatgctcagctctctgcctccccttgactacaagatgtagccacaggtttcctcaatgcactcaactgggatacctttccagaagtgtctaagaggctatgcatgcacttaaaagtttttgaattgaatcttgcacagaattctcttagatataaagttctaaacagaaaagtcttattctaggctgcaagcctagctgtcctttgagagatgttgtattagtccattctcacactgctctaaggaacttcccaaggctgggtaatttataaaggaaagaggtttaattgacttacaattttgtatgagtggggtggcctcaggaaacttacaatcatggcagaaggcaaagggcaggaaggtaccttcttcacaatgcggcaggagagataagtgcttagggaagagggaagagccccttataaaaccatcagatcccatgagaactcactcactatcatgagaacagcatgggagaaactgcccccatgattcaatgacttccacctgatctctcctttgacacgtggggattatggggattacaatttaagatgagatttgggcggcaacgcaaagcctaattatatcagatatggtattcactcttttggaaaaaatcaaaggctttaacttctgctaaaagttccaaactgggaagagatgcacatatctaaaagcaaaggagaaccacttttggtgagaatttaacttttttttcccggagtaataaatgcacatgtgtaaaatgtcaaatagtatcaatatcaataagtctatagtaaaaagcaagagtatctactcaactccttcttatccctaaacctgcctacaaaaaaaattaacctaacttttaaaaatctgcccatatttagttctttacagagttatttctaagtaacaacctcaattttgtatgtctttaattatcaaatttaggcattattgcctgcaacaagagatgaggactaaattcacaaaagcattttaaattatttttcttctttcctcccaatatagttatatcatggatgcttgttcctttaccgtttttataatttatctatttgatcaactatggacagtatctcatgactttcttcttcttaaaatgagtatatgaacgcccatctctttccttcatgtctcctttcatttcccttcatacttttgtttttttcatggccaaggtttgcagtacatgcattttgttctgtaaacacaattttgctttgtccttaggttcagatggaaataaataacataaaaaatgaagtgataattaatttcattttgcatacattttgtttttcttggagtatttaattatctatctatctatctatatctatcttgtaatgtctgcctttgtcatatccttaccaccatgtaatatttaaggacattttcaaatacatgaaattgtttttcttccttttcccatctttatggagtccttttgctctaacctaatccctctctaattctgtttcagagctatcctcctggatacaatctactcttgttacaggaaagggtcctgatccagacccccagagagggttcttggatctcgtgcaaggaagaattcagggtgagtccctagagtaaagtgaaagcaaggttattaagaaagaaaaggaataaagaatggctactccatagacagagcagccccaagggctgcccatttttgtggttatttcttggttatgtgctaaacaagaggtagattattcatgccccctttttagaccatataaggtaactttctgacattgctatggcatttgtaaattgtcgtggtgctgatgggagtgtagcagtgaggacaaccagaggtcactctcgtggccatcttggttttggtgggttttagccggcttctttactgcatcctgttttatcagcaagatctttatgatctgtatcttgtgcccacctcttgtctcatcctgtgacatagaatgccctaaccatctgggaatgcagcccaataggtctcagccttattttacccagcccttactcaagatggagttgctctggttcaaaagcctctgatactcttactggactttaagtcctcctttcttggttcactcccttgttttgctggagcatgtctttaaatagctttgtcacaaaggttgccaaggaaataaaacctctgggttcttgcataatctgtcttcacagctagttggtaattttgttgcatatacaattccaagctgaaaatcatttgcctcagaacttggaagacatccctctcagtcttgtaacattaagtattgctggttagaatttttcagccagcttgactcttatcctttgtaaatgaacagttcttactctacagaggctttctgaatattttattaattgatgtattctgaacctttgtaatgatgtgtctcaatgtggtctttctcatgcatgatgccaggatcaaagggccatttcagttcaaggacatgttccttcttcagccgtagaaaataaccttctaatatgccttcaaaaactggttcccttgtgtttgctttggtctcactttctggaatttctgttaactgtatgttgaccttgtaaatagacttttattatctctcagtttcttgcatatgtttctattcctttttgtttggttttgttgtcccacttgataagaaattcccccaactttcattgttaaaccttctgttgaattttgtagtttgcatatctttttttttctttccaagagatctttcttgttctctgatagtctttaacatcttatttatgtattatcaattttatgtcttctcaaatctctctgaggacatcaattaggatttttttaaagtacatttttattccctgaattatttgcttcctcctgggtcattttcttctgcttgtttaccttggtgttttttctttacattgcagactcctcaaatgcctgttacccaattgtccatttctattttaaaatacagcaattgcaaggctgtgagcttcgtgtctgtaaatgaggcactttctgggaaggtttcactccagcatgaacaggatagaaatcagctgaacccctagggccccagaattcagagcctggggacaccagtactcattagctactctgccactccacagacaactttatttgtttagtggagaaacctttgcttttttgcctgagggtaaacatctgcttattggctgtactgtgctcatagggtaggaaagattttgtcatggctcaacccttttttctttctttccgacttttaggttcaaggggcacatggcgcagatttgttacatggctcaattgcttgttgcagggatttggtgtagagataattttgtcacccaagtaatcaacatagtacccaacagtttttcaattcttacttttcctcaccctccaccctcaaataagcgccagtgtctattgttcccttctttgtgtccatgtatattcaatatttagctcccacttataagtaagaacatgcagcatttggtttactgtttctgtgttaattcacttaggtttatggcctccagctccattcatgttgcaacaaaggacatgatctcatttttttatagctgtgtagtattcagtggtatatagataccacattttctttatccagtccaccattgatgggcatctagattgatgttatgcctttgctcttgtaaatagtgcttttataaacatatgcattcatgtgtctttgtgggaaaacaatttatattcctttgggtatgtatccaataatagaattgctgggttaaatagtagttctgttttaagttctttgagaaatctccagacagctttccacagaggctgaactaatttacattcccaccagcaacgtataagtccctttactctgcaaccttgccagcatctgttattttttagttttttaaatgagagccattctgactggtgtgagatggttctcattttggtttttatttgcatctccctaatgattagtgatactgagcattttttcacatgattcttgcccacgttgtgtcttcttttgagaagtgtctgttcatgtcctttgcccattccaaaatgagattgtttgttttctgcttgttgacatgcttgagttccttatagattctggatattggacttttgttggatgcatagtttggaaatattttctcccatttgataggttgtctgtttactcttggttaatcctcctacatcacacgcctaccttcaaaagtgttctgaattcagggcctccatgggattctactgagcacatagacagctgcagagttgagggtcttcctttccatgattcgtcattcaccatcactctacacagttttgtctttagaaaatacctagaggccgggcgcggtggctcacgcctgtaatcccagcactttgggaggccgaggcgggcggatcacgaggtcaagagatcgagaccatcccggctaaaacggtgaaaccccgtctctactaaaaatacaaaaaaattagccgggcgtagtggcgggcgcctgtagtcccagctacttgggaggctgaggcaggagaatggcgtgaacccgggaggcggagcttgcagtgagccgagatcccgccactgcactccagcctgggcgacagagcgagactccgtctcaaaaaaaaaaaaaaaaaaaaaaaaaagaaaatacctagaaagctgtcattcattggcaggtctcctccgattctctttctggttgaaagagaatacattttttattctcttactttccttataatagcaacttcagaggaagagataaaaacacatacgttccacctctcattctaaactggaagccactttctgaaggaatcaacttcccaaagaagaatttcatttagttaattattcaaaagattcaactaaaataagaaaattccattcaatgacattttcttgggtatcactttgttcaaagtacagtgcttgactaactcaggaatttacaagacagtaggatttggttcttgcccccagataatttatgttctgatagaaataacagacatttatcaacatgttgtaactgtacatttgactgtatactgattttaagaaatgagtaaatatacctgagtgcccccaagtatggcttttagtgcaacattccaatttggctacaaatatcacaaccacaactactggtagccttggacccaagagtattgcgttgttacacaatactggatattttgcatttcaagaaaaagtctcacaatctctccatatggagcagtctttttcttaatgttcatatgtttacagaaatgagaactttggatattgtgaaataaatactggctaatgccagagcttcctgcatctctctcaagacccagcacgagacaaacacctctgtcagatttcccttgactaatttaaaagctgtgaattcattctgcttgcccagattttaaggcttctatccctggaatgtcacctcctcttcttttctgtccttgtgccattctgtttttttcagcaacgcatacccatttttccagactcagctaaaccagcatgtgtcctgctaatttgtcacttttcttaccttctttatctcctcaagcagagatgggtaattcctcctatgatgagacatttaccaatcactgactattcacctgctcctccacactttccaatcccctccctttaagtggggacatctggctacttctgcccattcagttaggagcagaagtggtgtgagtaactgccaggccaatgcaattaactgctagtacaagaccttccagctgtttcttccctggacctactgacttggaagccatgtgatttcattagagtaaccataagatgcaggtaacttagatccctgagtctccatgtgcaagggagctaccctggagagctattgggtctgcagtagaacttataagcaagaaaatacatttgccaattaagaagaaaaaagaccaacaagttaatagaaaaacaggcaggagaggtcattcacaatcacgggtacaagtggtcaataagaaaatgagatcatcaactttattatccatcagagaaatgcaagcaaaaaccacaatgagatacctacatgaataactaaaataaaaaaaatgacattcctaagtgttgagaaggccatggaacaactggaactctgacaacctcctggatagaatttgaactggtaaaactcccttgtgtaactggcaatttctaataaagctaaacatatgcttatccctaatctagaaatttcacatctaagatctttataccagaactgtgtctaatagtcaaaataagaaacaactcaattgtccatcaacagtagattgtaagtatcttggggtgtatctatgcaatgaaatattacacagcaataaaaagaaactacttctatcacaacacagacgaatctcacaaacaaggttgggcagaagaagccatttttatgggtatttcattgtaatcctctttggtaaaaggtatgcttttatttataaaggtcaaacactttttaaaaatagtgtatagtactgctttggggattaacgattgggagagggcacaaattggggttttgggagtgtgaaatattttatttacatctgggtgctgttcacagaagtgtgtttagtttaggatttgtagggttagtgatgtacatttcaataacacatgtatttaaaaaaattaaaaaaggaagaaaagatagttcaaatattcttcccttgaggatgtactcaaaagggaagatctagagtacagatcactaattccttggaaacaggggctgttacctgttgtatttccagcacccagtacaatgtctggctcatagtaggtgctcaataaatgtttgcgggggaagagagaagaagagaaggaataaaagaaggaaggaaggaaggaagaaggaaggaaggaaggaagaaggaagaaaggaaggaaggaaggaaggaaagaaggaaggaaggaaggaaaggagggagggagggaggaagggagggaggaaggaatgtaggtttatgttcaaagccactgaggactggggtttttcttgttaccacagaatagcctaataagctaactaataaaactcctctgtgcttccgcagtaccatgcaaacatatccattatagcatctatcactacaggaataccttggacatatttggggtttcatttcagaccaccacaataaagtgaacaccttaataaagggaggcacacaattttttttgctttcccagtgcatataaaagttatgttcacactatactatagtctcttgagtgtgcaatagccttatggtgaaaagaatgatgtgcataccttaattttaaaatgttttattaaaatgctaaaaaatgcaaacaatcatctgacccttctgtgagtcctaatatttttcctgggggagggtcctgtctcaacgtggatggctgctaactgatcaggttggtggtcactgaaggttggactagaggtgacaatttcttaaagtaagaaaacaatgaagtttgcttcagcgattgactcttccttccacaaaagatttctctgatccatgccatgctgtctgataacatttgacccataatagaactttcaaatttggagtccattctctcaaaccctgccactgctttgtcaactaagcttatgtcatattagaaatcttttgttgtcatttcaaaaatagtcacagcatcttcaccaggtgtaggttccatttcaagaaaccactttgtttgctcatccataaaaagcaactggttcaagttttatcatcacggtgcagcaattcagtctcatctttaggcttcacttctaattctaattttcttactatttctaccatgactttagttatctcctgcactcaagtctagaacccctcaaagtcatctataagggttggaatcaacttcttccaaaatcctgttaatgttgatattttgatttcctcccatgaatcacaggtgttcttaatggcacctagaaagttgaataatttccagaaggttttcaactgactttgcccagattcatcagataaataacttttacaactattgccttataagatatatttgttaaataataagacttgaaagttaaaattactccttgatccgtgggctccagaaaggatgttgtcttagcagacatgaaaacaacatttataggccaggtgcggtggctcacacctgtaatcccagcactttgggaggccaaggcgggtggatcatgaggtcaggagatcgagactatcctggccaacatgatgaaaccccatctctactaaaaatacaaaaattagctgggcgtcatggcacatacctgtagtcccagctatttggaaggctgaggcaggagaatcacttgaactcaggaggtggagcttgcagtgaaccgagattgcaccactgcacgccgcctgggtaacagagtgagactctgtctaaaaaaaaaaaaaagaaagaaagaaaaaagaaaacaacatttatcttcttgtgcatctccatctgagattttggatgaccagatgcattgtcagtgaacagtaatattttgaaaagaatatattattctaagcagtaggtcttgacagtgggtataaaatattcagtaaatcatgctataaacacttgtgctataatccaggctttgcagttccattttttagaggacaggcagtccatttcatataactcttaagggccctaggattttcagaatggtcaatgagcattgacttccactaaaagtcaccagctgcctctcttgctagcctataacagaaaaatcagcctgtcctttgaagattcaaaaccagccacagacttttcctctctagctgtgaaaatcctagacagcctcttcttccaataaaagtccatttcatctacattgaaaaatctgttgtttggtgtagccaccttcatcaatgatcttagttaaatcttctgtataatttgctgcagcttgtccatcggtacttgctgcttcactttgcacttttatgttatacacgtagcttctttccttaaacctcatgaactgacccctgctagcttctagcttttcttctgcagcttccttacctctctcagccttcataaaactgaagaagttagggccttgctctggattaggctttgacttaagggaatcttgtggctggtttgatcttctatctaaaccactaacaatttccccgtatcatcaatgatgctcttttgctttcttatcacttgtatgttcactggagtagcacttttaatttccttcaagaacgtttcatttacattcaccatttagctatttggtgcaagagacctagctttcagcctgtcttggcttttaacatgccttcctctctaaccttaatcatgtctagctttttatttaaaatgagagacctggccgggcgtggtggctcacacctataatcccagcactttgggaggccgaggcaggtggatcacgaggtcaggagatcgagaccaccctggctaacatggtgaaacctcctctctactaaaaacacgcacgcacaaaaaaattagccaggcatggtggtgggcacctgtagtcccagctattcgggaggctgaggcaggagaatggcgtgaacccaggaggtggagcttgcagtgaacagagattgcaccactgcactccagccagggtgatagagcgagactctgtctcaaaaataaataaatgaaataaaataaataaaatgagagacctgagatgctttcacttgaacacttagaggcgactgtagggttattaattggcttaatttcaatatcactgtgtcgcaaggaatagggaagcccaaggggaaggagacaggggaatggctggtaggtggagcagtcagaacacacatcacatgtatagattaagtttgctatcttctgtgggtgcagtaggtggtgccccaaaacaatgacaatagtaacattaaagatcactgatcacagatcaccataacgtatattataataataacgtttgatatattaccaaaaaataccaaaatatgatgcagagacaaaaagtgagcacatgctcttggaagcatggtacctatagacttgctgtatgccaggttgccacaaactttcaatttataaaaagcataattgcaaagtgcaataaagtgaagcacagttaaatgaggtgtgcctgtattctgtctccctctctctctcataatgtgaactcctttctggtaggagctagttcttcacaactaaagctggctcataataagcactcattacatgtaagttaaatgaagtaatttctcaccttgatgttccagtcacagtgattgattgattattgaaggaagtgacttccaagagatcataaatgggagaggtaaacaccagtggatttccttggaaatatgctgaaatcccactaaagacgtcagctaacctgctatgcttgcaacttgcatatgacgaaaacctccttccagaaacaccccaatagcttatctccatttctcaccttccagcccacccttgtagcaaatgctaccttgcaaaaatgcagcctctgaggtaagaacattgagctgggtaagattccgtcagttcaagatgatgagctttccttaatacgtcccaaaagaaatatgaattccactcctcctgggcttgctgaaccatagcaacctgtctgggctgccacacgctctgctcagaaaggctggagtgccaggttggccgcccttctgcctgttcacagggaaacgaagaaggttactcagagaatgagcagctgtaaggtctccctgagggggtagcatccttgggcctgcagagaattttgcagcttttctttatgcatttttaatcaattctaagctacctacaaatatgtgcaattactttctgcacttcgctttgtaataagatttaatgactctgctacaatcctctgagtgaacattgatgatctaactctgtgatttaaaatttagctttaccaaggaggaggatataaactgagagaaaggttttttgagtttttttcttccttttctttttctttctttctttcttttttttttttttttttagaaaatcagaagttggaaatattttagcctgcaaaatatctctaacactagagaacagaccatctcatttatttgccactgcaactgattaaaatataggggaaaaaaagccctgggcaacataagctctctttttctttaaaacattttactgattgtaataaacagagaggcctagaggcaccgagagagatcgtctagtctatttgcaagcatttacatatggaacatcctccaagtgcccttcacaaagagaatttctcccaactcaatcctttggaggactgcctgtttccaccatcctggtatatgctgaccaagttgttccattacaaatcatcagatacacagctaatatttaccaaatgcttgctctgtgccagccactaatcaaagtgccatacatccgtaagagcccccatgaatgacagacattgtcctccccatcacagatgaagaaatggaggcccaagtaagactgcatgttctctttgggagcatcagagagctacaatgccctcatttgttgagaaatggcccatggacacacaggatactgtgaatgttgctgcaaaccctacagcttaactttctatagacacctgcttccctgctaccaactaccacagtatagagtctggctcaactctcttcctgcttttccatgcaaggactgggccaccaaaggcactcaggagacttggccatcctgacccatcctttggagtgactttcctctagccgggactctaggaggtcctatagtctacctgggaaagggggaaaaggaaaaaaagtcccaaggcccagttgtcatcatcaagttgctctgcagtcaggtaaccaatttaggggcttgtgttctttatctagaagctaaggggataagatagagttccttaaagatcctctttcagctctactatatgtgcatttatttcacatttactgagcgtcaacaatgtattgggaattaaagattgctaaggccttttccaggcacaaagaaatacaaaagtttctgagtgcaatggtaaccctgtgacaaaaggttcaggctcagagctctttcttagaggcgcactggaataaagcagtttcttgcttctctgttatacagtaaaactttctactgccagaggctgcttcctccccttcccacaagtattcctgctctaggacgaaaacttggaactatatctcaatgaaggactagattagttatgggatccaaagtaactgaaacaagtaaaatctgattgggtttatgagctgctgggcacataaaagattcacccttgctctgtggtgctgtgtgttgttcagccattgcatgtgatttacagcccatcggtaactatttcaatgatcaggaacgactcataaagcatggtgagaactacctatagtttccgaaatggaaatgccagggaaatccccctttcacccaagcagccagcatcacaaggaatcctgcctgttagaaaagaaaaggaaatgggaccaaactcagctgatacctgcccatggagggagcatttaaaccagccctaaccagagggaaaccgccaatcttagcagccccagactgacttcctgcagacctcaccaacgacagccgaagtgccctgtgtctccaagtaaacttgaatggcaatctaggccataaggactgcaactcttaggtgagtcccagtgctgaactaggcccggagacagtggactggggcaggggcacacgacctactgagattccagctggggcatccaaggcagtgctggcatcaccactcccctaaccccaggctatatggctcacggctccaaaagaaaccccttccttccacttgagaagaggagagggaagtgtgggcaggactttgtcttgcatcttggataccagctcaatcacagcaggatagggtgtgggtcagagccatgaggcccttgttccaggccctagtgcctagatgacatttctagacacaccctgggccagaagggaacctgctgccttgaaggaaaggatccggtcctggcagcatttatcacctgtaactgaaaagccctcgggccctgaataaccaacagtgatacccaggaatcacatccagggtcttgggtgagcctctgagatttgctggcttcaggtaagcctcagcacattaccagctgtggtggcaatggggcaaaactccttcttcttgagaaaagcagaaggaaaagtaaagaggactttgtctagcacattcagtaccagcaaggccacagttgggtagaacaccaggtgggttcttggggtccctgattccaggaattgactcttagacagcatttctagaccctccctgggctagaggggagcccatttctctgaaaggtgagttctaggccaggcagaattcaccacaagatgacttaagagcccttgggtcttaagggaacattggcaatagcctggcagtactccttgtggcctagaattggcagtggctatgggctgaagctcctctgcctttagaaaaaggaaagaagagtgggaaggactgtgtgttgtcatttgaatgccagctcagccacggtacagtagaacaatcagtagacttctgaagtttttggttctagtccctgactgctggatgtcacttctggacccacctgggacctgggggaatctcactgccctgaaaagaaggacagaggcctggctggctttgccaccaaatctaagtgttattggccttaaagaggagttagagaaagagataggggtagaaagtttattcaaaggaataatgacaagaacttcccaaacctagaaaaagatatctacgttcaagtacaagaaggttatagaacaccaagaagatttaacccaaagaaggctacctcaagataattaatcaggctgggcgcggtggctcacgcctgtaatcccagcactttgggaggccaagacgggtggatcacgaggtcaggagatcaagaccatcctggttaacaccgtgaaaccccatctctactaaaaatacaaaaaattagctgggtgtgggggcaggcgcctgtagtcccagctactcgggatgctgaggcaggagaatggcatgaacccaggaggcagagcttgcagtgagccaaaatcgtgccactgcgctccagcctgggcaacagagagagactccgtctcaaaaaaaaaaaaaaaagaaagacaattaatcaaattcccaaacgtcaaagataaagaaaggatcctaaaagtagaaagagaaaagaaacaaacagcatacaatggagctccaatacatctggcagcttgactcttcagtggaaaccaggagagggtggcatgacacatttaaagtactgaagggaaaaagaaaacttttaccctagaatggtgtattcagtgaaaatatacttcaaacatgaaggagaaataaagactttcccagacaaacaaaagctgaaggatttcatcaacaccagacctgtcccataagaaatgccaaagggaacacttcaatcagaaggaaaaggacattcatgagcaataaataatcacatgaaggtacaaaacccactgggaatagtaaatacacagaaaaacacagagtattataacactgtgactgtgttgtataaactgctcttatccttagtagaaaaactaaacaatgaaccaatccaaaattataactccaacaacttttcaagagatagtacatatggccaggcatggtggctcatgcctgtaatcccagcactttgggaggccaaggtggtggatcacgaggtcaggagatcaagaccatcctggctaacacagtgaaaccccatctctcccaatgaagaaaagcccaggaggtggcttcactgctgaatctaccaaacatttaagaagaactaataccaaacctgctcaaactattctgaaaaacagagaaggagggaatactttcaaacttattctataaggtcagtattaccctgttaccaaaaccagaaaatgacacatgaaggaaagaaagaaagaaagaaagaaagaaagaaagaaagaaagaaagaaagaaagaaagagaaagagaaagaaagagagagacagaaagaaagaaagaaaaaagaaagaaagaaacaaagaaaaagaaagaaagaaagaaagaaagaaagaaagaaagaaagagaagaaaaagaaaactacaggccaatatctctgatgaatactgatgcaaaaatcctcaacaaaataccagcaaactgaattcaccattacattagaaagatcattcatcatgaccaagtgggatttatccctgggattcaaggatggttcaacatatgcaaatcaatcaatgtgatacatcacatcacagaatagaagataaaaatcatatgatcatttcaactgatgctgaaaaagcatttgataaaattaaacgtcttttcatgataaaaaccctcaaaaaactgggagtagaaggaacatacctcaacacaaaaaagctatatttgacagacccatagctagtattatattgaataggggaaaactgcaattcttttctctaagatctgtagcatgacaaggatgcctactgtcaccactgctattcaacatagtactggaagtcctagctagagcagtcagacaagaggaagacataataggcatccaaattggaaagaaataagccaaattatctttgtttgcagaaaatatgaccttatatttggaaaaacctaaagattccacaagaaaactattaaaactgataaataaattcaataaagtttcaggatacaaaatcaacatacaaaaatcagtagcatgtttatatgccaacaatgaaaaatctgaaaaagaaattttttcagctgaggtgggaggatcgctagagcctaggaggtcaaggctgcagtaagccatgatcacaccactgcactctaccctggcattgatgtagtgaaaccctgggtgacagtgagaccgtgtctcaaaaaataaaagtatatcacattgcttctttctcctcttccttctctccctctctctccttcttcatctctttcttttctcctccgtcttccttcttatttttcttcttcatttccttcttctctaccagcagcagcaccagcatatctaacatacaatgagcctttcctatatgccaggcactgtgtccaaagctttacacatattaactcatttaatcttcataaccacccatttaatgagtgggaagactgaggcatatgacagaactgtcctgcaaactatactggccattgcactgtgtttgtgtatttactaattgattggcacttaaggctgtatcaatagctatatcaatgtcaggggagggggaattataactgggcaaacagacccctagtttgcagacagcttcctgatatgggatagacatggaagagccattcaaacaggccatgctcctggtcccaagtgcaccaccaggggtcaggatgtacactttaggcctaaaagggaaagctatatgctgatcattgctgtttcccgtgaacccattttgattatgggaagtacagtatattagtccattattgcactgctataaagacctgaggttgggtaatttataaagagaagaaatttaattggctcacggttctgcaggctgtacaggaagcatagaagcttctggggaggcctcaggaaacttgaaatcatgggggaaggtgaagggaagcaggcacatcttacatggccagagcagaaggaaggtggtgggggaggcgtcatacacttttaaacaatctgatgtcgagaactcactcactatacagtaccaaagggagatggtgctaaaccattcatgacaccttcaccccatgatccaatcacctctccctggacctgacctctaccactggggattacaattcgacttgagatttgggtggagacacagacccaaaccatagcatatggacaaggtgtacaaagcagcaagtcatgcaaattgcagctggaatagacatcctcctgtttgctccatccaggcagtaccctggggccccaggcctgtcctttctcttggtggatcagcatatttctccatgcataccctccttaccaccagttcagcactaacatccttgagggtataggccatagtacccatggccccgatacaatgatgatcacacgggaccctgtggaaagagaaacgacgagaatacaagcagcagagcctggatgctgatgggcaccaaagagggcgacaccctcaggcagctctgctgagcccgcccccacccagtgcaaaacaggtgactggtctgcactccgtgatttataaggtactttcatgctttgcaagctggggtccttgttcattacttgtaagtatctacatctattttctttgggccactttcttttctgtcatgtatctgtgaaagtttctgttctctctctctctcttcatgtaaaatcattctgcctgtcttctgtgaaacttctgtgatgcacgtagctcattgacccaaggagatgcatcttctcagagagggaggcatgaatatttctaatagataaatgtcctaatagagaaagttggccattacatctgccctataggggtagaaaaaaagcttcatgcaggtggtgacttttgctatgaaccttaaagtaggaaataggaaaatagctggagtatggagaaatacttggacagtaaaaagagaaaaggaagctaaacagaacacaaggggataggtctgattgaagacaaatacagcatgtggaacttcacaatcaggtgtgtgaggcccaggaaatcaaatggagaaggtataagacaaactacccgactccaaacatctctaccccatttgtaagggcagcagatgagaatatagacagaaattttccatctgtgtgtttccaaaaattacatgtggtggaagcagtaaataatcatatccacaaaatatgtgggtttgtgaccgactgaaaagttgttcacatctcaccagtcctctatttagtagagtcaaaaatcctttaaatctctaccatgagactctacagaaaggaaaacggtgatgaagttgaacttcacacaaaattaaaaaaaaaaattctgcccctatagtgaggccattgaacaatgctaattgtgcaagctttagctccaggtttgctttcaaagatgtggggagagggaggagcagctggaaggagccagagggggagggaggaaggaaaaatcaggtctcagtgtgagcatgggaacgcaatgcacctctcagaaataattcctaaatcatctcatgctcctagaaaggaacaaacaactacttttaatcacatgtttctaaaagagaaataccagcatttacaaaattcaaaaaactctgaggatgcaaaactgtggccagttatgccgcagcacggagtgagtgacaatgaccagccaccttgaaaagggatgttataattgagccactgacagagccctaactggggcagcgccgctgggtgcctctagaacatggtgcattttaattgccgatgctggcatttatttgatgtctttggctggttcagagtccttttataacaatcctatttgaccacaaatcaggtacaaataaaaaagtcagccacaatgtcctcactcctaaaggcagctgtattattttacaggtattcaatatttaaatgttaatgaaggtgggactaggatggaatacggacagaagggaagtgagaagaattgaacttgttttgaaataagcaggtggactggaaggaggggaggctcagggagacagaaagaggacaggggagacctgcatgtggatgaatggacgcttctctattagccttggctgtgggccagcaggcagagggacaaaatggcttcaggtgtacagcaagcagggtgcaagcctgggtgccgagttcctgcctgaaatcaccacgctgtgcttaccgactgcaatctcttactgcatcctaaagcagcctgttcagctctccgtggaggccccgtgctttgctacatgatgtatgtcattctccgtggcagatgtagggagggagccacacttctctcccacctgctggcggtttcccgaaatgcagggcacacccggccattcagagggctttgctgatcccccaaattccattttcccacctctcatttggaaatcaaagtgtggttcaggaacaactccaagtttagctaatcagttcctatcagtcacttcttcgttaaaatgtatctatatgtatctctacttgtagttctagggtgtacataagaacagagtgtgctggagtggatggatggtaaatatttgctgatgtcgactctgcagggattttgaataagatctttcaccaactccagaaataactacgctttctcgtgaaacacaaccgaatgaggccaactactctttggacaggggaagtgttttggtgtgtgtacaaaaatctcattgttttcaaacaccgagcgtgttcttttcacttgagggatgtcaggcaaagaccacaacactgacctttcaggttagcagctgtgccttctagaatactcatgagataggagggctgggaggatgtggaaaggagacaagaacgggccacctgtaccttctcagactgaccactggactgcagaccagacaaattaggctctgagtcctacctgatcaaactattaacttcaccaatcttgtttcctgtaccttgagtaatacgtagagggaattaactcttctaagggggatgaatgccactgaggtgccagacaggggcgacaggagagggttgactggcttggatccatcagccaacaactccttcaatctagagtacttaaagaggcaaataaaattgatagaataggaaattataagacaataaccacaatcatcatgatactgtaacataagagaaaaataaattgtctacagagatccaggagaggaaaggttgggtaagaaacaagcatcctcaataaatgcaaaggctctttgtaaatcagcagctgtcagccctcatcagaggcagtaaaatgttggtgtcctaaggaagtagtagcattcaagatgcaggatgtcaaacattcccctctgtggaaaaccctgagacccacagtggcctggggtgcagtgtccacggtggttcttaaagtttagccagccgctggaccagcagcagtgacctcacctgggaatttgtttaaaaagtagattctcaggcatgcacagccccgctgaatgagaagctctggggcagggcagccacctgtgccatagcaagacccacaggtgatccgtatgcacacgtgagtccgggtataaacctctgctcctagctgccaggttaaccagcctgtcctggacaaaggcttgaggctcacaagacaaagacagcacttttgcagtctgttttttctgagggcaggtgtctgcattgcacggagggcgaggttcttgtgtgcacgcccaggctggtgggactggaacccctggaccacacctttgccaccgggtacaagtcatcagtactaaccccatggaatgtgtgtgccccagccacttccatatgctccacatgctgtcactcattttattcttgccacagcccagtgaaggaggctgttactgttacctccattttatcaatgagaaaactgacatgccattgtcacacagctacttatccctgggagaaggaatccaatcagggcacagcactgcccagcctcccaagatgagtctgttattggctcacgtgtgcccacctaagggcaagaactgtttcttccatgtctgttttttttgttgctgttgtttgtttgttttgttttgttttgctttgctttgttttgtttcatgcccagaacatcactggcagccagcaaaaggttaatgaataaatgaatgaaaacttacatatcatgagtttattgtttttcaacctatgggcagatgaaaccctattgtgaatagtcttgggtccatattgttccataagctaaaaaagaattcttcatgtgtttatacgatttttgaaagatatatacgaatcattgtgatgagttttaagaggttgctgagttcaccgttattttctgtgtcatttctatgtttaccgcctcagatcctgaaagaacaaaaactatcaggtgaggcaccatgacattttgtcacattaaaaaagattcgtaatgttggatcatgaatcagagaaggaaaaggagagaaaaagctggagaggcagaagggatttgagaaagagggtgcagagaaccaacctttgaagcaaaagccataatgagaactttgctcctgcccctaacatgacatctcacttcctatgtttcaccccagcagggctcacataagagaattttaatttgattcatttaaggaccactatcctgattggtcaaagcagaatttgaacttgaattgtactagaattgtttgagaaccacattccttgtttaaaatgatcagactttactcgagacttttttggatgtaattaatgaatcagcaagaatggaagccagcataagctaccacagagaaatcaggcagaagcaggaatgcaatttgcttcctgcattaccagcaataaacaatcctttatatcataatgtaagatctaaaaatagctcactttaaattttgagcccttgtacataatgaaaggaggctgtgcataaaagccagttattcatttattctgtacattagaggcttcaacagtaagagcccaattaacaaaaaagaccagtgggaaattatgcataatattttttgtttattacaaagagactttattttcatatctcactgcaaggaaattatgtgtgcgacttgcataactcacacatggcagtattccctctgaatttagagttttcaaaaatgaccatgtagaaagaattgaggtgggaaaatggtgattttagaaagacagtaccactgtgtcatcagcagtgtgaacagcatttcccgtggctgtggccactggtaaggcccataggcttggacagaggggctattgtcctagctgtgtcttcaaagaagctccagcatcaggactcaggaattcttagtgtaaatcctgctttagaaggggccatttttccatagactgtctcatccattccgagcatgtgacacaaatgacctctaatcttcttccatcacgacatcgtacagataaagaaacagaagatgagtggattgtggagctagagtgcttgcactgatttgttatgacaaccttgaggcccaaagtcctcttctgctgaatgagatgggataaaaagattatctttaaggtacctgaagctttgctgctgtatgaccactaattctcaagggaactggggacattcccaggatgtcgagtaacaaagaagaaataacagcggtcacatttgctcctcattcgagattctagttgaattgttcttcctaacttcccatgtccatgacataggataatttgtgatgttgctgagacctgttttgatgccaggtaggaagctggcatgttggagcaaatcatttgcctgagaataagcctgctgaccaacccatatccccattcacaaaagcccagctgattctcttctccacaacacttatgagcagctcttgtgaactgattaaacttttcctcttcctagagtaataaatgacccaaaaagcgagccactggctagtgctaggtcctgaactaaagagaaagagaggcagcctcaggaagcaatagttctttttcaaaaaaaaaaaaattatttcaatagcttttggagtacaagtagttttttgctacatggatgaattttatagtcgtgaattctaagctttcagagcacccctcacccaagtcgtgtacattgtacctaatgtgtagtttgttatccctgcatccccctcccaccctctcctttctgagcctctgaagtccatgatatcattctgcatgcctttgcatatgcatggcttagctcccacttataagtgagaacttacagcttttggttttccactcctgtgtcacttcacttagaataattgcctctagctccattcaagttgctctaagaggcattatttccttccttttaatgactgagtaatattccatggtgtatatatactacattttcttcattcactcattagtcaatggatacttgggttggttccacatctttgcgattgtgaattgtgctgtgatgaacatatgtgtgcaagagtctttttcatatcatcacttattttcctttgagtagacacccagcggtgggattgctggattaaagggtagatctacttttagctgtttaaggaatctccatactgttttccataaaggttgtactaatttacattcccagcagtgtgtgagcatcctcttttcccaaaatcgatgccaacatctattgggtttttttttgactttttaataatggccatacttgcagaaataaggtggtggtatctcactgtcattttaatttgcatttccctggtgattagtgacactgcacatttttttcatagtttttgtccctgggtgcaagtgcagtatgtactgaagagcaaggtagggccaggcacggtcactcatgcctgtagtcccagggctttggaggctgaggcaggaggattgcttgagcccaagagttcaaggcggcagtgagctatgatcgtaccactacacttgagcctgggcaacagaatgagactctgtctgttaaagaaaataaaaaagtgaagtgacaattcagcagggctttgtcctctgaccggcccaccatatatttttcctggataaaaccatgtgtaattgcataagaaaattttgatatttattaagatctcaagacatatcttttaagaatatcaaaggcctttcatatctactcaagtcaagagccattgatagaaagtcctttggctcaaatacaaaagagcatcttatacttgaactggataggaaaccgtagctgtggggtactgcaaacctgtaatcccaatagatgtactagatctccaagccctatgctagcaaaaggcactgtaagcctcttcccctttgtgcggttacagatagaaatgtacagatgctacatcccttggacagagcatgcatctaccctcccacctttattgtgcctaaatctgccagaagaatgttattttagaaaataaatgtccagatcatgagggtgtgataggattggagtgttcacacagagcataagactcattgaggtcatcttcacaattatgtaatgtttgcagttggttcttttaatatcaagaatgactacacagtcctccccaagttctggcaaggctaggatacgtgataaatttcacagtacacacacatggcatggtcacaagaacagataaaaattcaagaaggaagagatgagtctttggcatcactgcagtgggacattcagtggctcatgggggtctcaagtctctaacagagttgactgagcaggcccagtctcccataggtccccaagtgactccgttcccagacccctcatcttcccaggcaccagtctctaggaagaggcacatattggagatgcgcagagcgaagcacactctttcaggtcagcgattcccaacacaacaccctaggggtgagaaattaatccagacatgggaaattaatatgacaacttttatttactatcatttttacttatcgtacacacatgtaacatatttgacatgagtcatatttctgacacattttacagttacatgtataaaactatagaaatatgtgaaaatcaaaaatattttcacatattcaaaaatacgtgaaaatcaaaaaaattttgaacctgtgtacgtatatcaggacacgtgttcacaattttttccaagaatgccctagattacctcccttgaccaggacactgtatttcctttttttttttttaatgtagcatttatgtttctttttttttattttattttattatactttaagttttagtgtacatgtgcacaacgtgcaggtttgttgcatatgtatacatgtgccatgtggtgtgccgcacccattaactcgtcatatagcattaggtatatctccattaattttaagattttactggcaagactccccccacattcaatttgcaaccagctaaaaagccatgatatccttcacttaaacttacgttgagccaggcctccctacatttgtgttagtaaaaatacttaattgaacaaaatgttagaatttccattcgtccttatttgaatttattttgttgatttcggcccactatttttgcctgtcaggattaatacatttgttcattctcaactacgtttaaaaacaaaaaattatatagaaaaaaaagactggagaaagataggcaaaatattgacagaggttgtcccaaggttaccagttgaaggtgatttattatactttctcatgctatttttacttttgaaattttctataataagcgtgcatttctataacaatagaaagataaacatttgtagagcatatgcttaaattctatcatcttgcctcttcaccgcctctccagaccccatgtcaatggtaaatgctctaagtttgtatctctaaagcacgaagtaggatttcatctataactttgacttggtattaatggtttatttccattaacatttcacaatttcaaagaacaataacatttagccataaaatggcatttaaccaaagaggacatgcattaaggcaaatggaggagactgcgtggtttgcacgctctgggacataccaggctaacctgtaaggagaatgtcttgtccccctgccctggtttgtgcagggagaatccattcagctcctgaggatgaacacttcttttgcaaggtatttgcaaaccacaccatatccaccttttatttaagtttttgatttgctgataaatggcttattatcttcagaaaaaatattagctaagcccagatcttttacctgtttcctgccgaaagtggccagatcaaagctgatatcaaaattttatcctaataaacatttcacatcaactttgaatagaacaaaatagttaaccgcagttgtaattttttaaaatgttgaaataattgactcaatgtgtgactggtgagctaagccagtgctaaccggggcaaaccagctgtgtcactgtccatgagccaatcttctgtccatggtccccactgcacccctggatggggcgaggacgctgatggacttgcagagaggagtcggtgaggctgcatcagccccagacagcaggacaaccactgggagccctcaccatgagcagaaatgtcacctccccagagccgaggaaaagcagaaggcatcctacaaaaaccttcacaaaggtaagtactgaccaacagaaagtgtggactgtggactgtgtggaatgtaccagataaaagcagagacatttggatatgtttcctaaatgcagtaaatgctgaatgaggtgaatgagcattgatggaatcggaggcgataagagcagcaggcacaggacgagtcccatggggacgtgctggataaaccagacagtgttttgacgatgctacagccacggcagcacgaagaaatcagcagttaagaagaaagtaagatcatgaggggactcaaaattggtatgagcaatatgttattgtgtttctaaagatgaaaacattcacggcgtagattataaatatgcagctattatcaatgattctgtacaagatgtgttattatctagattcttaaactagtagcttagatgcaaccattatgaaatgattgtacagaaggaatataggagaattggggcctaattagggtacaggaagcctgatgggaaggcaaggcttacaaatgaatctagggtaggggtttgaattcagagtgagggctcatttttgaccctgttcttgatcctaagagggtgtaataaagaccatatttctaaactcatatataatgcatatctatcactttgtataattatagtaggtatatttcatatatttctgaaaaattgtatgctaatacttctttttggaaagtcaaattatgctctaaatgcaccagaggagataatgcatagacaattgctttgaaaaattttaaagcacaaaaatatcagttattaatgataacatctgcaccataatctgtgaccataactctaacttggtgttaaaaactcaatatgtaaaattacgatgacagtaaaataaatactgattatctctttttaaaaaatgaagacctctcatgtaaaataaatgcatttcctcacattttgtgttttttatgtttatgctgtagaaaatgaattcagctgctgcatcccagatgagctggcccagaaaccagtttgttccagcagcccagacctgacttagcttatgagcctatggggagcaggagcaaacacatagatgcacactaaagaaagtgaaaacaaagatacaatttggtggctaactgtacacagaagaaaaagacttcaggcatcaggaaccaaccaaagagcagcctgggtgactaagagatgttactgtcatcgccaaaaaactggatagttttggagtgaagccaggctggggtatacggccaggaggatagtgaaacatcatggattcagtttcctcggatgagcttgggtgttcaaatcactgacaatcagcatctcagcctgagagcttacacttccgtcttgtgaagttttaaccggtgtgagtaggtttccaagaacctggtcatccccacaggatctgatgaaaattagttcctagatccacaaaaaaaggaagcagggctggaggccacagccggcctgattctcaaccatgtgcaatataggaagaccagctttagcacaagtcagggcctccaacctgagcccaaacagctgtccacaaggagctggggcatgcgccccaagctgagccaaccctctttagacatcagcagcgggccagggtcggccaaagctcctcatgatatgctaacatactctatgacaccctattttgctgctagaaatgactagagaggagaaaaggagccagaatgaatcattatattaatagctctccaattcaaaataaaacattttctgaaagtttactctttgaagaaaattagcaaatcattattgaaaattcagagtaaaggtgattgtcgtgttagaccctgaaatgcacacagctacgggagacgcatcacagtttgtcgttgaaggacaatggacactcctacgaattctagtagaaaattgaggtctacattagcaaaaaaaaaaaaaaaaattaaatccatattgaaacatttaaagatatgaggaaagaaattgcatttgaactactgtttcaacagatagagtattctctgccattgacattgtgctctcaaaagaatcagtgttgtacctgaaagtgtttctaagagacagaaaaatcacatgctcacatggccactctcaacgtggatgctccatcgttgcttcccaaacccctctatacattcatgcctaaaattcctctaagaacacaaacgtttgaaagcttggagcctgggtgagaagccaacaatgcagctgatggccgtgccacctcttcctgtagatatgtcacacgtgtgtagctgtcaccgcggcattagtcatatatttttcagaggaatgacacacaccagaagtactagatcacttacatgttaattgcaattacacagcaaaacataatgggctgccaaaatattcacaggataattgccctgcgatgacaagataattcttcctattcttccaaaacagaaggtagttgccccatctaattactttacaatcttccaggcaagaaattttcacttggtcccagccaagctggtacctctccgcgcatggcctctctctgagcagccttcatcagctcaggggatgtgtgcgggtatgccaggatcccatccaggctgcctgacctcagcaccactgacttgcagagccagatgcctctgtgtgtgtgtgtgtgtgtgtgtgtgtgtgtgtgtgtgtgtgtgtgtggaggggatcagcaggggtgggcaccagcctgtgaattttttgtagaatgtttagccgcacccctggtctctacccactagatgataataccacccaccacactcagttgtgacaaccaaaaatgcttccccgacactgccaaatgtgccctcggggcctaccattgggaaccacgggattctgtgtatttgcccagttgttgaggaagtaggtcctgtgcatagcggttgatccaggggcacagctcagaagcagggaggctgggtactggacaccctctcctcctcagtcctcctcttcccacccctccaggaactcagccaggctgccctctcctcacctaatgtctcaactctaaaaagccaggcaggccttcctccctccaaagagcccccagctgtgaaacaaccctgctgcctgccctgctttccacaatgcccctcccaccaccagaccgggcgcagaggccttctcaaggctgtttcaccagcgctgcccatctcaggtcagaacgaggggagaaagcactttgattgaaaaataaggcatacaacaatgatatccttaattctcacaggggtgtttgatgagaattcaggtagtgtgcaccaatgaacaaagaaatagtgtggggtcagaaagccattttcagtattccctgcataaggctggccctcctgagcccttcccagaccctgggggccgggcaatgcttcagagtccaggacagtccagtcctgaataaaaggagcagacagtggatcctgaattgacttgatttaacttgtctctgattatttcaaataataaattaggaaacttacagaagattctcagtacagcattataatgtgcttaagatacaatcaccaagtggtgatataattgccttagaataggggttggcaaacattgtgtgtaaagggccaaagacttaatattttaggcattgtggatcacacaagaactattttattctgccattttagcatgccatagacaatatgtaaattaatgagtgtggtcgtgttccaataaaactttattgacaaaagcaggctaggggccggatttaattagggccatagtttgcctatccctgtctaggaggatttccacttgcttttgcatccaacgattactgagcttgaattaggagccaggcattgggaagcacactggggatatcggatgagtagcacactgacccacctcctaagaagcttgcagcctagtgggggtgatgtgtaaatagcagatccagaagaatagatacagcagaaacccagaggcataatcaaccccctgccacccccaggtgaggggtcccttggcctcatgctcaccaactcccaacttatttatctgctcctatttacggcaaaactccccaaaacagtagtggtctatgttgctatctctgcctcctcagctccccccacccccagtctattgagcctattccatgtgggtttctggtcccaaacattcctctggaatgttgtcaggaatgacagtcactctaaataaagccttcaccaggggctccaggtgcgctgaagttgcccatccactgacagaggcttcgtttctgcagaggctaccacctacgcctcatcaacacacttgaggtatcccatcctgtgtccctggcagctggggcttcccaccatggccatgccccagagggcatcctctttcttctgagtctcctgtgctcatagtaaaaaaaaaaaaaaaaaaaaaagagagagagagagagagagactacagttctgaaatgccccatctccaataaattttaccctatgctcctatctctgcccctgccagatgcctgccaaagtgaagggcagggatttagccagccactgtccactccctgcccactttgtggctcaactcagaggcatccttcaagttccaccatatcatattcatgtactatcttctttgctgtaatttatggacacaattggagcacttccgagctccaattaagatggtgaatgtatctcattttataatatttagcaagacttcaccactggctgaccttccaaatgcgaagattgggctatattttaattctcacttcgtggtgatagctttgtgtctgagttatgagtgagagaatataagatgctattgttttcctcttttctaaccacaaagggcaattgcattggaagtggaaatttcatagaaaggaaaatgaagacacccactcctgtagcattacgggaaatagttcactgactccgcagttcagatgctgtctttgatcattacaacatacctgtacctctgatttttaaaattccacccatcacaacatcatccaagggtgcacatgaagaaaatcagcacattaatttttgtagcaaaaacattagggagggattgcaattcacagcttatactggttcaagatcaacagcaatgacataaaaccacctagtgacaggcttcctggagaagtcccaaatttgcaaatagacaaaaatgctgtcaactgaaattagtggaaattgaaggcctttgacctatcctactctgaagcctgagtcggctgcacaggtcctgcaggccttccctttgtgaaaagaggcagagagatggggttctgtgccttggccactggggcaaagagcagagcacaaagctgagaccatgaccaacctctgtcacagtcaccacgctgctgaaatgactggctttactagcagcattgccaaatcagaagtcacggctggggattatgtagctatgcctggggcacgcacgcatcagaggcctagtctgtgatatggcagaggctgaaagcaccatctgtccaccatccctctctcaccagcctgctctatctccgaaagaggagtaacctttggtagtgtcagtgctttcacagaggtcaatgcaccctatgagcaggatggaactcagaaccatggctctcatactctgtaaattctcataaagatgtattagtttcctgttgctgctgtaacaagtgattgcagatgcagtggttaacaatacacacatttactctcctattgctgcaacagcccaaagtcagaaatgaatcttgcaagactaaaatcaaggtataaacagggctgtgttccttctagactctacggggagtgttttcttgccttttccagattctagagtgcacccaagttccttggctggcagctcctccctccaatttcaaagcgtgtcactccatctctgtttttgacacctgccacatcttcttttctgactctaacctcctactttcttcctataaggacctttgtgattactatgagcccacccagatgatccaagaccaccctcccctctcaaaatccttaacttactcacacctacaaagtcctttttgctgtgtaatatagcatatttacaggttctgaggattaaaacatggatatcttgttgggggaggaatggtaattattctttctatcgcaaacacatgaaaaggcaaaatccagaatgaaatactgcctgtcaaaggcagaggacaggacacttagaaatggatgctaattcaaaggtctgctggctggaagacgtgaagggagaggtaagaaaaaggaggagaaaggtagagattgccaaattcagagacagagagcacttgaaaccacagcactgacttggagtcagcagccctgggacgcaagctggcctggcgccacccttttctgtgactctatgcatgacccatgcctttctgagctttattctgctctcttcctcacccttcactgcctcccaccctggctctgcactggtgaatgtggccttccttcctggtcgagctgctcctgtcaacccctctctgggactctgtgtccctcctctcacctgtgcctcacaagtcatcttctcactcttctcctctgtccttcttctccaaggaatcactcctttatcccacaaacatgctggaatctcccttctcagaaagaaatctcccttggcctcatgttcacctctgcccagcttatttctctgctcctatttatagtaaaactccccaaaatagtgatctatcttgctgtccacctcctcagctccgctcacccccggtctattgatcctactccgtgtgggtttctggccccagacattcctctggaatgctgtcaggaatgacagtgactgctttgtcttgcctgggggcagtcctctcaccttccttgacttctcagtgccttggacatggctgatcacccctcccttttcagcatttccttccttgcctcccttgacatcaggtcccccagtcttctccctgtctccctgtctgcatcttcttggcctcgtttgccaatccccactccttcctttgccagcttgtcaacgtcgggcaccactggctccgtcctcagacctctcctcttcctactcctgttctcttggtgagtttacacagtctcaccaccctcaatgcctcctgcatgctaaaagtgacctcatctcccttatgagctgcattagtctgttctcatgctgctaataaagacatgcccaggactgggtaatttataaagaaaaggaggcttaatggactcacagttccacatgactggggaggcctcacaatcatggtggaaggcaaaggaggagcaaaggcacatcttacatggtggcaggtgagagagagtgtgccctttataaaaccatcagatctcatgatttattcactgtcacaagaacgacacgggtaaaacccacccccgcattcaaagacctcccatcagatccttcccacgacacatggggattatgggatctacagctcgagatgagatttgggtggggacacagccagatcacatcagcacctcaagcgcccttcccatctcgagactcctgtatccagctcctacccagtatctctatgtggataccagacatacatctcagacacagcaggcccaaagatgagccttggttcattacctccagccctgctactcccaaggtcacccctacttcagcaaatccgttctgactgctcaagccaaaattctaggggccaacattgcctcctcaccctctgctgctgtacccgcagctcagtcgtgaagcccattggttctatattcaaagcctattcagagattactctgcactttgtgcagcctccaccaaaaatccctaagcctaagccaccatcgttcttcgcctcgaatactcgagacaagtggtcctccttatctgcagttttactttccacagttgcagttacccacagtcgactgtggtctgaaaatattaaatggaaaaaattcagagataaacagtccattaagttttaaattatgcatcattctgggtagcccgatgaaatctctcaccatcttgctctatcctgcctgggatgtgaaccccctctttgtccagcatccccacactgtctgcactatgctcccataagtcacttagtagctatctcagtgatcagatggactgttgtgatatcacagtgcttgtgtccaaaccaccctgattttacttttattatagtatgttgctacaggtgttttattttattattagttactgttaatctcttactgtgcctaatttttaagttaagcttcatcataggtatctataggacaagacataatctatatagggtttagtactatccgtggcaacagacatccaccggaggtcctgcaaggcctcccctgggtcaagaggggctactgtagactgctcaccaccttcccttcttgccccatctatgttctattttcaacacaacagccaaagagtaatactttccttttaaaaaacaaaatcagatcttgtctttcccccacccaaaatcttcccacgacgtcctatctcatgcagaaaaaacagacaacagtacacccaccagttccctgtgatgttcatgtggctccagttcagcctctccggcctcattcccagaggctcccatccagcctcactattcctggaacagcagcctctgtgccgtgcacttgccaagtccactgcggagaccctagtttcttcagaccttcccaaggttcacgccctgactttatggtgtctctgctcaaatgcctctttcttgagaggccttccctggccaccacatccaacatggctccttgtttccccagcccttttccctgtccttttgcagaatgtgaaacacaccatcgcatgcaatcagtgtgcatgtttacctgtggatttcccatgttcctactggaatgtgagcaccgtaaggactgatatttcatgggtctctctctgttgcatttccaggacctagaataacacccagtgcataggaggtgctctatttgtagaatgtagagtgtttgtagaatgcaagtgtgctctcacagcacgactgttcacgccatcacggtgctctcttgctctattctaattgtctgtcactccaatcgcctcccacacagggctataagatcttcaggggtgggggtgttatctcctttgccccaatgcctaggtatttgtatgtcttggatgcttggaaagatgaatggagaaatgaattgatgagattagatgagtcagaattatgcctaaggttggccttgggcccactgttcgacaggtaaattggtttgcttttaattcatcagacatttcagtgggctgtataaatgccatcccagctggttacacaggcaggaacaattgaaatgatattaaaaaaaaaaaaatctggccaggtgcgatgactcacacctgcaatcccagcactttgggaggctgaggtgggtggatcacaaggtcaagagatcgagaccatcctggccaacatggtgaaaccccgtctctactaaaaatacaaaaattagctgggcgtggtggtgcatgccttaatcccagctattcaggaggctgacgcaggagaatcgcttgaacccaggaggcaagggttgcagtgagccgagatcgcgccactgcactccagcctggtgacagggcgtgactccagatcaaaaaaaaaaaaaaaaaaatctatgggctgacactttccactttcccctagggtataattagcgatggggtagcttccacttttcaaagcctttcatggcaatctagccccatctgccctacctgtgccttaaacaattggaggggatgtcccctggatactctccaaatgccaccctcaccttcccagcagaaatggcaagtctagaaaattgcctcctaaagctaattctgacataatgaaaagtaaatacaaatgtatccattttcctctggcttctcttcttgatttctatcagacctcgagagattctgtaaagaccctggccagcattcactggtgtggatcatttaactaccgttgtgtttaactatcattgtcccaaaacataacttgataatttggggctgcccaataaaattttaacaatcttacctttttttgctctaaaaaaaaacagcaaaaaaaataaaataaaataactaaaccagatttgttatttgaagaaagggaagggaaaaaatgaagaaatcacttaaaatatagatatttgaaagtatggttggggaaactagcatccaaaccatttgtattagaattatagtattttccacttaaagaagtgagacaagttaattgcatagttaccataaaataaactacatggtaattacacagaaactcctttagaaaccgtagtaattacaccgaactgaagccttctaaaatagaccaagagttaccaagttcacacacaatggaaagatgtttaacctgttcgccgactacttgatgtgaacagagcacggccagtgacttttgatgcccgcttctggagataatgacttttaaatacagatgtctttctagaaatggtccctagcacaatatttcctttcaacaaatgggagaaaaagctcagttacccactgccaggcagcaggaaagttgacagtaatttgccgtctgagggaggtgacagtcctaaaagggaaatattaacagtctcgattttagaaaggagcttttggttgctagctcacatttacatactgtatgtcgaatctgaaaggaagctatgttcgaatagaaatggctctgctgagaagtgaatggtacagtatattttgtatagaaaaagcaattttcttgggaattaaaaggcctgttacgcagtccctgcccaaaaggctcaaaacaatcaccttttgtcattctgttttacacaagccaaattattcagctggcaaagtaaaaggggagggagataaaatacacggatgagggagattgtcatcccccaagaaacttggtagaacgcaaaggtctgggaaataggctgtaggaatcctgggctcttagcatgcggtgttgtttggaggtgactagctaactgttaggagtgattttatccaaaaggtggaagtctgtctcctggtgtccttaagtcatggggattaaggttccggaagaagcaattccagggtttctaatggtccctggagtttctcggcacagagctcagcctcctgctgccctccccaaggcgagacggggctcaacaggcctgtctacaaacggccttgccgctgctgctctgctccttgcagggcctccacactggccgcagcccaggatccagatgacatcaggactagattccgaatcagctgccaaggctgttgtgaatttaatttcatagacattgttctgctaagttgatgccaggacagatgatgggtatgagagcaagaaatgagattagcgatgagcaaaaccagacgaaggggaaaagagaaatttctaattgcacataacttaaacctcatttgcgttccactctgacgcagccaggccaactccaaacccacagagatgtgtttagtgcaaacatacttctgttaaaccctgacctgagtcctcgctgtctgttacacacaaacacaaagtgtcgttgtgtctagagggctgtgggcatctctgctaagaggtgcaatcattaaaggcagagaactgtctcccacttcattttcctagctccataaacatttgttgactgaataaatgagtgcctgggtctgagcagagatctactagaagtcaccacagaatgtcacaacctggagccaaaagactgcatgatctcaactcggcctggtggctcacgcctgtaatcgtagcactttgggaggttggacgcacaggggataacaggtcccactgagacacagtggccatctagtccaggcctctgtcaatgggtggcctcctgctgtctgggcaaagacctgacctgtgtggacgtgagagaccgaggtttatgcacaggctcatggtggagagactaaaacaagcacagcccagacaaagtcagcggtgatgctgggaggaactccaagatcgtctgctgaggtgggcagatcacttgaggtcaggagttcaagaccaacctggtcaacatggtgaaaccctgtctctactaaaagtacaaaaataagctgggcatggtggtgtgtgtagtcccagctactcgggaggctgagccaggaggattgcttgagcctgggaggcagaagttgctgtgagctaagattgcaccactgcactccagcctgggtgacagagtgagaccgtctcaaaaaaaaaaaaaaaaaaacgaagactgtgtgatctgttaagggaaagacagctgcaaagttgtcttgctcctaaatgtatgacaatcaaaaaaaccagagttgttacaattagttagaatcctgagataaggagcattttagagttgtaatcttgcagagtcatgcagtgactggcagcgataagaattcagcattccagatgttttttcaacacttctgtccaccacgctgcttagggcttcattcacaattgctccatttcaacatgccatgtgtctgaagtctatgcagtcatcatccctcagaaagactcgtggttctgcatgtgtctaggatagactgacactaacttgacttgcctattactgttctagagtggttgctagttaaaatgattgccatgaaacttctcaagatagactgccagggaaacatgttacatcaaccatgttcttgagtaagaatgtaaatgaatacattccctattccagggacatatgaggtagaccttagccctaacacagcaggggttttgcaccaggaaagccacagagcagacagacggtcttggagttcctcccagcatcacctcggactttgtctgggccgtgcttgctttagtctctccgccatgagcctgtgcgtaaacctcggtctctcacatccacagaggtcaggtctttgcccagacagcaggaggcaacccatcgacagaggcctggaccacatggtcaccgtgtctcagcgggacctgttatcccctgtgcatccaaccagatcccataagaaggcagccttctcacccagacctagattggaccaagtgtgtggactctacttgatacactgaaatgttcaatgtattttaaacaactaatctcaatatgttattgaattcccaagaacctctttggtgaaattgattttgtaagcctcacacgccctgggggtgccccgccaccccatttagaaggaacagggtggctggtgggtgatgcaggggtcttggccacacctgtgtctttgtcttgtcattggaaaagtggagatgatggcagagcctccctctcaggctcagtgcaaggactaatgagagaaaatatgcatccagtgaagaaataagtgcccaaccaatgttacctcttatcactatgaactgcagctgaggaatctaagttccggggacggggccaaaaacacagcaggaggatcacggggctaagaagaagattcctacctgccaaatctcagggccgtggggaagtgctagcagttcacaaagcaactcagggccctgctcagaagtgagttttttccttttccccctggaggaataagcagattttaggtgatatacaaagacaatcacattttggaaagcaaaccccgggacattgtgcaaatatgcacacacattcatatacacatacaacacacacacacaacacacacacatacatacacacacaacacacacatacacacacaacacacacacatacatacacacatacaacacacacaacacacacaaatacatataacacacacacatacatacacataaacaacacacaatacacccacacacacatacatacacacatacaacacacacaacacacacatacacatgtatacagaggtacgttttacatgtttatattttctaatgtaaaggcaacatcaactgtagaaaatttgaaaaatattgaaatgtatgacaataattagaagctactcataatcgcataatctcaacatcaggaaaattcgcagtcgacattctgggagttttcccctaaacacatggatattttgggacaatagccctatccatacatctttgtataatatccttcttttgttgatgtgccacttcaagaatttactcggttttacaagacaaaattttaaagacagagaaaatcttcccatgctaccatatgtatttttcctctttaggggttttatagtctgacacacaaaagtcaccattcagaaccctaagtgcatggggtcagtccctctcagccacgtcgagactttaataccagagacatggacaggcgatacctcctccccaggaccaaggactgagtgatcttgatggtgaagaggtgactgaattcttcaaatgggcactgcatacaatcaggtccacagggatgcaggatgggcaggcatcccatctgtgcccagtctgggggcagtggagccaagttggctacctgaaagcatcaaccttgatggcaggaggctcagtgtccccacagagatgcagtcccggtttgggctctccaggaggcaggctccatctttcccgtgtctgcccagaaatctctgctcctatgtcacccgacattctgttgcttggtaactagagcacctaattattctactaggaggtcaaagaaatgccagcaaccccattacatagacccaagaaagtcagacataaggcattcatttgcataagagaactttatttttcagctagagataggaaagaaagagactccaaagttcagtgtatttttgctaatacgaaagcaagatgacctggaaaataaagtgcagtacaaaaaaaaagtgacgaaaagcaagttagaagaggtttttggtgtttgatttttggtttttgtttttaattcctgaaattgttcatagacaaggagtagtgaatggtcaaggagggaaagtactttttcatcattgagaagagaaaatgctttttaaaaatctgttagataatgagttgttttctagtaaagatttcttaaagatcatggggtttttttggtttgaattttgtttttttgtcatttttgtttttgagtggagttttctttttaactaattctaggttatcaggtttaaaaataatagagttgttttttacgttttttgttgacaatatctgtgtgtttttatctgactctctgtggctataattgccagagtttcatttcctaaagaattcttccttttactcttggttgtttgctaaaaatatcccagctgcctgtagacaatgggcatggctgccgcctagccagccccctgccagtggagtgttctgctattcatagctaggtcctcttcagacacgtgaagactggaggtcctgatttctatgtcttctctaagtaatgccatgagtgactgcaggggctttggagaaacatttcgcgttcccagccatacccatctctagatagatatgactcgctccacaccattacagagtcgagaaatgctctctcatttcctgattgtctcccagtcaaatttcacaccaacgttgcagcacaccatgggcctctgcctgccttgagtggtattggataccccagaaccgcccatcccgtttaaaataccccaaaaatgctgctaactgccccctggaaccagaaaagctcggaagcaaagaacgaggcgggctgggagagaggggagaaagattgttccttgagaattccgttcaccgatgaaaactggcgaaaaaattaaacagctcccatgttgctgggctcccgcgttccttacgtcacccggcactcttgcttggtgcgtgctggctgacttgctctccgcacctgctctggaccagcgctcctcccgggtctgcgcatccgcggggagcgggaggcccggagctgcaagggtcggtccgctcgcgccctctgctggcattgaggagtcacgacctggtcgaaccggccacttggacctgagttgctcggtgttgccctcagggccatttcacccaaaacctcctgttcattttgaaggcttatcatagcccagacatatcccctatggctgaaagaatgcaggaaataattaattggaaagcacatgtgaaaaataacatacacaggatggtggggctgcaccatcaatgtgaatgcacttaatgccactaaaccgtacacttgaaaatggttaaaaaggtaaattgtagggctgggcatggtgactcatgcctgtaatcccaacactttgggaggctgaggcgggcggatcacttaaggtcaggagttcgagaccagcctggtcaacagggtgacaccccatctctactaaaaatacaaaaattagctgggcatggtcgcgggtgcctgtaaccctaactactagggagactgaggcaagagaatcacttgaacccaggaggcagaggttgcagggagctgagatcataccaccacactcaagcctgggcgacagagcgagactttgtctcaaaaaaagaaaaaaagtaaattgtatgttgtgtacattttaccacaattatatatatacacatatgatgccaatgagggcatgtgaaaagaagagcaattgtgctgacacatctaatgtgctgctcccaatccacttgaagccttcttctttcccctggccacggagaagtcacagtcggtgcccagggctggttcctgggtagggagggtgatggggtacagaaaaggtagcccagggcctcagggggggcctgggcagagtgtggtggtcacacagcaaaaactgccccctccctccccatgttattctccacctccctcctcactctccccagagtgtacgagagagactcatggcagccccaaaaatggagccatgaagggctttaaagaaccatatatttgccaagtatggtggcgcatgcctgtaatcccagcactttgggaggccatggtgggaggatcacttgaggccaggagtttgaaaccagcctgggcaacatagtgaggctctgtctctacaaaaaaattaaaattaaaaaaaaattagccaggcttgtggtgcacctgtaattccagctgcttgggaggtcaacacaggggaattgcttgagcctgggagtttaaggatgcagtgagccatgatcaatggcatcactgcactccagctggaaagacagagccagattctgtctcaaaaaaaaaaatgtatgtttaatccttcaatcccctccttttcaaagttcagtgtggtgaggaagattggaaagtggagaggcgccctgagcaagctgagagaaggggcacagggacagccatcaccccacacgcagagtcacccaaagacattcactccaacaggaaaactccaaaacttgagtccaaaatccaaaccagaaaataaaatggaccgtgctgtataaacaacaaaagacaagcttctctctctctcccgtctatctgtgtcaagctctctggaggaaatggacgctcgctaggaggaaaagaaggatggagggagaggtaggaagagacggtatgatgagggacagggtagaagaggactgggcagcctgcccgcctggaacccactgtctagcttcccaccgcagactcaagggatgctcgcggctaagagcctcaagggatgtcggggctaagagcccgctctgcccgggtttgggcagaaggtggacctgtacattccagacccagcaggcaggcccatcagggagtgtggtgtgtgcactgtgcaagccattgggggttttaatatgtgctatatatcaagggatatatagcacatgttatatatgtgctcaagggatggtcggggccaagagcccactctgcccgggtttgggcagaaggtggacctgtacattccagacccagcaggcaggcccatcaaggagtgtggtgtgtgcactgtgcaagccattgggggttttaacatgtgctatatatcaaagggaaaaatgtaaaccaccaaaccatctctcaatttattcctttatagcagtccacattttaaactctaaatgtaaacatgtagcctccaaatatggtactattctttttaaaaaagaaaagagaaatttggcaagagcctagtaaattgacatcttgcacaggaactcatatttgttgtctgtcaacaccacggtctggagcattcattaaagttaaactaaagaccttaacgggaatctctgggccatgtggaaaggagcttccagaacgaccagcagagtgctgcaggcttgcaaactgggtctccagcaccctacagagacagcaaggcgcccccgagtggtggcacatgtccacagtggtgatacagccagccacgtttgctaagacagaccccgcctcaaacatgtggggtctccacattccacttaatcctgcctccctcttaagctacagacctttcacaaactatgtggaatagcatagcatctcctataacagcaagtttacgatcatatttgctgcatttgatttggaagggtttatgccttatagatgagcctcacatttaattgatgaaacccatgtttccgaagcacattgaagaactatatttttatggagatgtttgattcaggaaacatctgttgagaacgtgtcaggcctaggcacaggatcagtcatctgtgcaaagctgctagagctgttagtccaaaccagtcctgagaaagaaagatttgtcttcttactttgtgatccagctccttttcagtcctcattccagactttgagggtagttaacatcgattgtcagcttcctccaggtaacaaggaagctgattcctggggggtgcctcacagagcttaacaaaatttcaccagctaaatccaatctacagagagaggtacacagagaacatcaatgtaaagctcttattacactttaattttttaaagtaagtttttaaaattatttttaaatatatttattttaaaaattattttaaaaaatttatttataaatatttattttaaaaatcactaaaactttttaacaattcctcagatgtattttgatattctatttcggtctttcattcattcaacaaaccttttttgaacaccgacattgcagatacttttcagggaaagaacaagatagagcccctgacctcactggggacaggcaaggaaatgtgtagtgcagtcataaaattttggagaaaacttaaaggggaaaacattctgggtgagggagcacactagtttgattttttaaacagcatttccagagagtcctccttttaaggtgacatttgcacaaagacttgaaggagtgtctctttttgttcaggaacactttgtagatatacataatttgtcagcacatattcagtgagagatatgggaacacaatgattaggggtgtagaggcctgccccacagagctcgcagtgccacggggatgaggaacggacagcaggcaattacagccgcccagcatgagtgtatgagggctgcattccaggtgccggctgaacccacaggtaggcgtctaacccagaacaggtgggttctagatgctgggaatgctgcagtgatgaaaacagacaaaaatcccttgttttcaaggaggtcactttctactgaataggaaatatatgtaactctatctctatcaatatgcacatatctttaatctttatcaatctgtgtatctgtcacctatatctatgtgtatctatccttatctatttctacactatttatatctctatctatctagctatatatctatatccctttatcaatctatacttatttttctatttctttccatatacttatgtttgtttgtttgtttgtttattttgagatggagtctcactctgtggcccaggctggagcacagtggtgcgatctcggctcactacaacctctgcctcccaagttcaaatgattctcttccctcagcctcctgagtagctggtattacaggcgcccaccaccatgcccagctaattgttgtatttttagtagaaacggcattgcgtcatgttggccaggctggtcttgaactcccgaccttgtgtgattcgcccacctaagcctcctaaagtgctaggattacagatgtgaaccaccacgctcgacctatatttttatctatttgtgcatatctatatatctacacttctatgtctatatctatctatgacagccagtcttcaagaattataatttatcaaggggaatgggaacatatctataccggaacttgtccatacaggcacgtgcctatcattcaaagcagaattatggaccctcaaaagaaaagtaaaaatgcaataagcttccaaaggaaagaaacacgtattcagtgaggacctcaggaaacacctaacaacacgtagccagtagagatggaatgaagaacacaggaaacataaggctgtacttggaaaaggcgagactcccaggcggcctcacgcatcagctgttgagctgggacttcctcactttcctcgtactagaatcacttccttgtactggaacacagaaaacctggagccagatgacagtatggaccacagtgatgctgagaagccctgggcccctctgtcccacgctaggccccaaacacaaagctaatgacaaatatttataaaagacaacatgactgtggcagctactcccagacccagatacatttttgcttaatgctctgaataaaaactaaaaaaccagggtatccgcaatggaactaaagtttcctgcaaaagaataaaaaattctattatcctcatgtaaaaaaataaaagaaaaaatgttactattttgtgatttaatgtcaacttaaaatatcatttaattgaaaattatggaatttgttattttatccagactcagacacctcatcaaatcagtatttgacttgtcaatattggtttaattgcaaatataatgggtaaaaattcctaagattatataaaatatatattcccaaattatataaaaccccatctcttcttaaaatagcgctgggagattttctgcatctcagtcagagtttagctgagtgggcctctaagaaatgtttgttgaaaatgcaatgattcaattagaaatttcatcgcaatctttgagacaagtgtaaaaaggctgagaaattttgaagaaagcaggaaaatatagaaaccatctggaaatcttaaatagacgacagtaattattcagctgtttagaaacaagtcctaacaagaaaacttgaagctggtctctcattttctgctaaaataattgcttgttttgaaatcttacagtttggagttttataatatcactaacagccaacgtccccgctccctatgacagatcccatatggcaagtcacgggttcacatttagagaacttcaggatccttgtcctaaacattcgactcacccccaaacactgctgctgagcccctctttgtaatggcttgactgctgttcattctcttactcttcattgcttcactcaacttccagaggctgaagtttcttcccccgcctgtaggccaagtctcatcccgagtcccagaactatcctggttccagtacaagggaagtgagaaagtcccaactcaacagccgatgagcctggactccaggtcagtttctcgagcaccctccccagtgtctgaaccaaggcgagccctcctgagtgttgctgactcaacataaatgcacaagtaaaggtcctcccttattgggttcctagaactaagtccagcctcaacccagtttcctcagaattgcagctccttggacactccaggtgggtctgtgaattgcaacaccatggatctttccctgagggcaggttccccacaacctgtacccaaactttccttgcattcatgctttgctcatgctgaaaaatatatcttctgctaaacttccctacatcaacagcacccattccccaggcctgttgggtcgaatggcatctctggcctcaactctgttcttccctagccccttccctgggagtttatgtcttggcttggcgtcctggccccgacataaaaactcttctcatttgcatgctaaccataatattgatagcagtacgaggcaaattcctaggcagaaagggtgggtcccccttgaaacccaaccttcaagccaaaaacagcgtaaagcctgaaaactgggctgccagttctgggtgaagtccatgacccagagtgagaacttcctagatgccttttagccagtcaaatggtgctttttccaggcctgaccatggaccaatcagcatgcactcctgcattctgaacccataaaaaaccccggactgggaactacctgccgccttcaggtagggtctacccactgcgggtcccatctccactgagagctgttctgtcgctcaatgaaactcttctctgccttgctcactctctggtggtctgtgtaacctcattcttcttggacgcaggaacccaggacccgatgaatcgtgggtgcaaaaggggcggtaacaccgtagccctcccaccctccaccggtactgggtggctgccccgtgtgatgggaagcagcggtggccaggccagcccaggggctgcgggctgccccagggtggcaggacccaacgggctgggacacgcccccgtttgcgaagcgtgcagatggtgggaatgaatgaactgtaacacgaacattgttattttatccagaatcagacacctcgaagaagctgcgacccttctggggcccagacctcaggactccctgagccagagccgtgacccactgtatcacccccttggagctccacagtggctgtcgtctctgagtttttaggcaccaccatgctccccttatctagatgctggctcccaaggcggacgccgcttgtggtatgcctggtccagccacagcctcacacggagccagcgctgtgccagcacctggagctgtcggccccgccacagcagcgcgtgcctgacccacccttggcaggtgtgagatctgggccgcaggcacaagccgaatgcagcctgcctggcgagtgggaggggcaagtgcagcggtgagcccggagcccagcaaagcctgggcaggagcaccaccagctgtggacatttccagctgaagaaggggaacccaaagaatcctgtgtcagcatcatgacctggcgtgacccgtgcctcctctttcctcaggattctctggaggtcacctcttctcccctgagtggagttcctgcttgccgtgaaccaccagtgcaccccggactaagctcactcctcagctcccctcttccttcctctggcccacgctgacctctttctggtctttattgcccagaaagaaaccaataggcagggcacggtggctcacgcttgtaatcccagcacattggaaggccgaggcaggcggatcacctgaggtcaggagtttgacaccagcctggccaacgtggtgaaaccccgtctctactaaaaatacaaaaattagccgggcatggtggcaggcacctgtagtcccagctactcaggaggctgaggcaggagaatcataggaacctgggaggcggaggttgtagtgagccaagatcatgccactgcactccagcctgggcaacagagcgagactccaactcaaagaaaaaaaaaaaaaggaaaccaataatttgtggaaggatcaaagaaggttggaggactacaaggtcctctagagagatcctttaaaagtatttttttttttttgagagggagtctcactctgctctgtcacccaggctggagtgcagtggtgcaatctcggctcactgcaacctccacctctccagttcaagcgattctcctgcctcagcctccgagtagctgggtttataggcacccgccaccacacccggctaatttttgtattttagtagagatggggtttcactatgttgatcaagctggtcccgaagtcctatcctcaaatgatccgcccacctcagcctcccaaagaaaaatatccttttaacaatagaaactacgggtccatccctgtattattctgcttcggctgctgtaacaaacaaccacggagcaggggagcttacgcagcagacactgactgtctcagcattctggaggctggaggtccaagatcaaggggtcagcaggtcgtttctcctgagcccccctccttggctttgcaatggccaccttctccctgcatctttacagggtcatccctctgtgtcctgatctcttcttacaaggattccagtcagactgggttaaggcccactctgatggtctcacgttttactcaattgcctcttaaaagactatacctccaaatatagtgacatctgaggtactggaggtcaggacttcaacatatgaattggggaccagagaacggggaggacaattcagcccctaacaatccccaagcaaaatgtaatacaaaaaaaataggctgggcgcggtggctcacgcctgtaatcccagcacttcaggtggccaaggaaggtggatcacgaggtcaggagatggagaccatcctggctaataggatgaaaccccttctctactaaaaatacaaaaaaatcaaccaggcgtggtgtcacgcacctgtagtcccagctactcaggaggctgaggcagcagaatcacttgaacccaggaggcggaggttgcagtaagccgagatcatgccattgtactccagcctggtaatagagcgagactctgtctaaaaaacaaaaacaaaaacaaaacaaaaaacaaacaaacaaaaaaacctgaattgtcttcagagagccccctgggcagtgtgcctgagttatgcaaagctgtaggtcgaatgtagcacaaccttctagagagtccgttttacctcccaacatgttgagcctagaaaaaaaaaattgtaaacagcatattttggagaattcaaattttgaataaaattttactattaaaacacaagacttcagaacaaaatttgtactggcctcaggccatcctaagctgggtttttagtggcataagttcttgggtaaaactacgcaaaagaaaaactacgtatagttttgtgaacactatgttggtggaggagttcagagaggccctgagtctttctccaaagagtactcatttccagtgtcctcgtttcttaatgcgtgttattttcataagcaaaacagaggtcccagagctccctggggtgtaaatgatgttgaaggattgttggggttgaaataggctgaaatttttctactcaggcagagttcatgtcttaaatcatatccccagggtgcagttaatttattttaattgatgggagctttttacgttttctgaagagctccatctgagaatgaggttgatgatggaggcagaaccagccaactcttaccgagagggacacatttctacaggcatttgtgatggaatctgacagaaaccctctcagaagaatgcatccccaattaaactttgttatgactaaaacccacgtttttaaaaaaattagcctaagagggaatgcatgatacttttatggaaatgtttaagtaattagtagatattagtaatatgaataaatggaaatttatgccctgatccttgtgcaaatagcataatatagtatacctaatatagtagatacaccaattaaccagcttaatattgtagatataccaattatctctaaattaatctgtatatttaatgcaatcttaatatttcaggtgatttttaaatgaattcaacacaataattccaaaattacatataaaaagccacaagtgactaaactgattttgaaaatgaagactaaagataaggatcacggtggacttaacttgataaaactattgtaataagagcaatatggttctgcacagatttggacaaatagatcaatgagacccctgaaggagctcagggatagtcttgcaccaactttgtgtataatgaaggcagcaccatagtacagtgcaaagagaagagattgtttagtagatgatttgcaagaaattgaatcactatggagaaaaataaagctttattcccagctgacgtcatcaaaacatttaaactccagacagcttaaaaacctaaaagttgaaagtaattgcaaagatataggaaaggtctttgtgacccaaaattagcacaagattgtttaaacaagtaccaaaaagaacaagccatgaagttatttattaatgggtcaattcaatgcagcaaaattaaggcttttggtttagggacaaatgctaaaaactaagttaccagacacatgacagattaggagatttgcctcatcaaaaatcaacagcatattaatatttagaatgtacactcttataaatcagcaagaagaaaatttatagaaaattgaaattctatagaaaacaaaaacatgactaagaacctacagaagggtatgtgtaagcaggtatagaaatcagtggtgatcaaagtaacacaaataaaacctactatggtttatttgtgatgctataacaaaacacctgagattggataatttatgaagaacagaaatttctttctcacagttctggaagctaagatccagacaccagctgtttcagcatctgatgggatccctgtctctgcctccaagatggcccttttgttgctgtaccctctgcaggaaaggaatgctgtgtcctcacataacagaagagatagaaggaggaaaattggccacctcaagcttcttataaggcaccaatctcatttcacgaagggagagccctcatagcctaatcacctcctgaaggccccacctcgtaatactactgtttgggcagttttgtttcaacatgacttttggagagaccctatcattcaaactagtgcaaaattacaatggcagaccactttatatacgtcatgaataatatcaagaattggaaaagatgggaggaggcagaaacccactctacgatgctccttctacaaggcacatgaatacttcagaacacataataaacactttggagagagcggctatgagaggtgtaggagaggcagagctggtacaagggggaagggcaaataaaaaggagccctgcacaccacagtgatgccagtgtgccatgatcttagggctatgaggacccaattctgccctaaagatcaaaagaacaactggaggaattttatacacgattgatagttatcaatgatgtaaacatttccttaattacaagcatcacagactgccagatccacccaaatccctctgtgtcttcctaggtatatgagaaatctctacacttcctacctaccttcttttgcagtttggttgggacatctgactggggtctggtcaatgaatgtgtcagaggtgtttaaaccagagtgactccatctggaatagggactgggtaaaataaggctgagacttgctgggctgcattcccaggaggttaggcaggatgagataggaggtcggcacaagatacagttcataaagaccttgctgataaaacagtttgcagtaaaggagctggccaaaacccacaaaaccaataaggcaaggaaagtgacctgtggtcatcctcactgctcatgcattaacatgttaaaagacactctctccagcaccatgacagtttacaaatgccaaggcagtgtccaaaagttaccctatatggtctaaaaagggaggaaccctcagttctgggaattgcccacccctttcctggaaagctcatgaataatccattccttgtttagcatataatcaagaaatcaccataaaagcgggcaaacagcagccctcagggcggctctccctatggagtagccattttttattcctttactttcttagtaaacttgctttcacttgactccatggattcaccccaaattctttcttgaatgagacccaagatccctctcttggggtctgcatcaggacccctttctggtaacaagtgtgggtgaaatgccgcttccacctggctctgaagcatctcatgttgtcttccatgctccatctctcccaaccatgaggctaaacatgaagaactctaagacggcagaaccacttgaagaaaatgtcaatgaaaacatatctgaaacaggtctcagtcgagaagtttattttgccaaggttaaggatgtgcctgtgacacagcctcaggagatcctgatgacatttacccacggtggtcagagcacagcttggttttatacattttatggagacataaggcaccaatcaatatatgtaagatatgcattggtttgatccagaaaggcaaggacaactggaagcaaggtctttcaggccataggtggattcaaagattttctggttggcaattgggtaaaagagttattatcaatagaaaggaatgtcaggtttatgataacagttgtggagaccaaggttttattatacagatgaagcttccaggtagcaggcttcagagagaataaattgcaaatgtttcttatcagacttaaagtctgttatatcagtaattacaaaaaggagtaggggataatgaggcatgtcagctcccacttcccatcatggcctgaactcatggttcaggttaactttggaatgcctttgccaagacaaggcgtctattgaaatggttaggggacttagatttttaattttgattaagaaaaggaacctggattcttcaattagcacatgtaggagaaccacccaagaaagccacctaacctcattagactcttgtgagtaagaaataaaatgactttgagccaccgggatttaggagttgtttgttttaacacttagtctctccagactagaatagtactctgtcaaaggtagtttcagcctcatcattgaaaataaataaataaggcctagctgcatacctagcaccaggtgagtttggaatcatgagagactaagagaaattcacgctatgatgattcaatttttaggaagcaaattagaagtgtctcttccttcacaccatggcaacgctccagcatgcagtcctcattaatagagcatgggcttctgaggctgaatagagcagaaaggcatttgctaacccagtcttcctcaagaattcctctcataatccaaaacattctccagtgaagaagaactcctaaagaaacagcagaagtaggagatacttgaaatttattttgacttttttttggtagtgggattgttttgttttgttttagattcagggggtatgtgtattgcataatgctaaagtttgagctctcagtgaacccctcactcaaatagtgagcatagcacccaatagacagtatttcaacccttacctcccagtcactctcccctcttttggagttctcagcgtctattatttccatctttatgtccatgtgtacccattttttttctcccacttacaagtgaaaacatgcagtatttgactttctgtttttgaggtatttcacttaggacaatggtccccagctccatccatgttgttgaaaaggacatgattccattcctctttatggctgcatagtattccatatacacatatgtaccacattttctttatccagtcaaccattgatggacacaggttgattccatgactttgctattgtgaatagtgctgcaataaacatatgagtgcaggtgtctttttgataaaatgatttcttttcctttgggtatataccagtagcaggatttctgggtcaaatggtagttctatttttagttctttgagaaatctccatactgttttccataggagttgaactaatttacagtcccgccaacagtgtataagcatttccttttctccacatccttgccaacatctgttagtttcttttgactttttaataataaccattctgactggtgtgagatggcatttctctaatgactagcaatgtggaacagtttttcatttgttggctgcctgtatgtttccttttgagaagtgtctgctcaaatcctttggccatgttttaaaggggtatttgtttttttcttgttgatttgttgaatttccttatagattctggatattagttctttgtggaattcatagtttgtgaatattttctcccattccgtaggttatgtttactctgttgattgtttcttttgctgtgcagaagctctttagtttaataaagtcctatttgtctattttggggtttgttgaattttgcttttgaggtcttagtcgtaatatctttgcctagaacagggtccagaagtgttttttcctaagttttcttctagaatttgtatagtttgaggttttacacttaagtctttaatccatttgagttttttttttatattgtgagaggtagaaggtccagtttcattcttctgcatatggttatgcagttttcccagcaccatttattgaatagagtatcttttcccctttgtttatttttgttgacattgtcaaagatcagttgattgtaggtatgtggacttatttctgggttctctattctgttccattgatctaggtgtctatttttgtttcactaccatgctatgttggttattatagccttgtggaatagtttgaagttgggtaatgcgatgcctctggcttgttcttttcacatagaattgctttggctatttgggctcttttttggttccatatgaattttaaaattctatggaaaatgttgttggtaatttgacaggaattgcattggatctgtagattgctttggtcagtacggccattttaacaatattgactcttcctatccatgagcctgggatgtttttccactggtttgtgtcatctacaatttctttcatcagtatttcatagttcttcttgtagaggactttcacctccctggtcagctgtattcccaggttattttatttgttttgtggttattgtgaatggcattgagttcttgatttggttcttagctggactattgctgttatataggaatgcaactgattttgtgcattaattttgtatcttgaagctttacggaagtcatttatcaggtctaggaatcttttgggggaatctagggttttttagccataagctcatgtcaccagtgaacagagataatttgacttactcttcttcaatttggatgtgaaatttactttttatgctaaaaatacattctccttaactcagtatgacattcctttctaaaatgaaattcatgaagaaataaagatagacatatttcctaatactttacaatacttagagattcagattttggattggttcttgttaatcccacttcctcctccttaggtttccacaaataagttaagtgcactttcattaaactttaaagagcagtgtggaacttccaggatatttttctaaagagactggtgaactatagagaactctatagtgaactctttgacaatccatgtcttttttcccttttcatctcatcaaccagggattctctttcccattgttcccctaagcaatcagcgtccagtcccagcagacctcaccactctccccacaaggcatagcagctcctgctcacatcaatcctagataacagatgagtcaaggaactagagattcagcttccatcctgaggcttacatccaaacattcatccacaaaagcaggtcactctctagagaaagcctgatgaaccacctcttcagcaattaactaagttcagatgaacttcaattctcaaggaatcagagacttgtttaaaaaccactataaacaaaataaggcaaaaatgagttctccaaatgatcttggacatcccagcctccaaaactggtagcaataaatctctattgcttatatattacccagtctgtggttttgtttttttgttgttgttgttgtgttgttgttgtttttgttgttgttgctgtttttgagacggagtctcgttctgttgcccaggctagagtccagtggcacaatctcggctcatttcaacattcgcctcccaggttcaagcaattctcctgcctcagcctcttgagtcgctgggattacaggcatgtgccatgatgcccggctaatttttgtattttttagtagagataggatttcaccatgttggccaggctggtctcgaactcctgacctcaggtgatccacctgcctcggcctcccaaagtgctgagattacaggcgtgagccaccgtgcctggcctgtggtattttttaatagcaacctgaacagagtaagacagatgggaaacaaagatatgattagcatccatgtaactttaataataataaagaaggaaaaactgaagagacacaacatacgagagaagttttctgaaatggaacctaaccttcaagaaggaattaaatgtttattaaaattgtaaaatatatgtgcaataatattaagatactgccagcccaaactgacacagacagctgcttatcaaatcctgacacataacagcatttgtgtctagtagtttgtgtgtctcaccaccacttttatcctggcaggagcatcatgaaacaaggtaactccaatgtcctcagcctaagaaaacagggcttgtaggctggtggctcacgcctgtaatcccaacactttgggaggccgaggccggcggatcacaaggtcaggagatggagaccatcctggctaacacagtgaaaccctgtctctactaaaaatacaaaaaaaaaaaaaaattagccaggcatgatggcaggtgcctgtagtcccagctactagggagactgaggcaggagaatggcgtgaacctgggaggcggagcttgcagtgagccgagattgcgccactgcactccagcctgggcgacaaagagactccatcaaaaaaagaaagaaagaaagaaagaaagaaagaaagaaagaaagaaagaaagaaagaaagaaagaaagaaagaaagaaggaaggaaggaaggaaggaaggaaggaaggaaggaaggaaggaaggaaggaagaaagaaagaaagaaagaaagaaagaaagaaagaaagaaagaaagaaagaaagaaaacagggcttgtatctggctctgaaaaccttctaacccccatcaacccacttaatgtccattgggacagacatgaaggaggtggacaggacatggtttcatgtgatgtgacactgtcacgaagacagaaccattgtccattgtccgttccagtgcaactagatcatgatcatgctgattaacaatttatggacaagaaaatacaaggaatcaggagtagggtaaataggaatcgtttgaatactgaaaggcaataggtcatatgtttctaaactgtaaagccttgaaatgtagaatgcctgtgggtttgccagcaagttccagccatgctcggagggagacagcctccacggaggcagggtctcgggagcagctgggagatgcttcctgtgtgcgggtgtgggtaagagagaagagaggttaaatgggaacatatggcggaagattaaacaacatccctctaatccccaattgtctggctgcccctgctgtaattacatgccatcagattcaaaggccaccagatgttcaaggcctaaaccaggaattacccacttggccactatcttgtgaatgagggctttgactggaagggcaaagctgcatttaaattgaacaagacaggagcatttttagatttgtccacagtaagtgagagaagggtgggaaaccagagcattaaccatttcctttccaacagagaaccacaggctgatgagcatgaacttaattacgataaaggtatctgtttagattgttccctggtaaactctcactgctctgttgagctcatagaattctcacttcagttgttaactcaaaagacaaagtttatctcatcagctattgttttccttgatgcaccagtaaataaggcttttcttcattaaaaaaatttaaaaaacaaaagccgctccctgtttcctttaaacagaagcataatatacgatgtggtcaataagaaggggccctcttatttgtgcttcattgattttcataattatttccaggagttgatttaagccaggtgccgggagaagggctatctcccaacactaagagtgacagctgagatagatctatctgtcctcctgattttaaagtgtcacgtaatcatgaaactaagttaagtacccagggtcaaaggtctgattctcattaatttggtgtgaaattctactaagcaaacagtctttcccacagacagagcctaggtcctcaactctagctgttcttgacacaggctcatcttgggtttacttctgagggtaccaaagaatgtgcgatcaaagtgtgacgagggaggactagtgctgtcaaatgttaaaacacccgaccttcaaataattaggaatgtttcagactggatgtactagtttcctaatgcattgcaactaattaccaccaacctggtggcttaacataacagaattgtattccctcacggctctaggcacataagtgcaaagggaaggtgtcaacagggccacactccctctgaaacccgcagagcagaatccttcctgcctcttccagtttctggtggctgccagcattcctgggcttatggatggctccagtctctgtgtcggtctttccctggcttctttcctgtgtccctccctgtctcatctccttttctgtctctcataaaaacacctgtcattgaatgtagggcgtatcctgattgaaaatgatttctttccagagtcatctgcaaagtctcttattctaagtgaagtcatattctgaggctctgaaagggcatctcttttggagaccactagcaagcccattacactggaaaagctatacataaataaaacaaaattaggaatctataaataaaaacaatttcctattgaaatttagttcataaattaaagtgacatttcaaataaatgggaaacagaggagttataaataaaggataatataaaaattggctgtttggaaaataataaaactaggttaccacctcatttcttatcccaaaactaaattgcagatggataaaacatttttataggaaaaaaatcataaacattctaaaagaaaagatggatacatgaattggtcatctaggcataatccaaaggccagaagtcatgaagtaaagatggacacacagaaatgtaaaattctattttttaaaaagtcactgaaaaagtgcttaaaagctgctcaggaggctgagacaggagagtcacttgaacccggagggcggagcttgcagtgaaccgagatcacggcactgcactccagcctgggcgacagagcgagattctctctcaaaacaaaaaaaaagaaagaaagaaaaagaacatgactgaaaaagagttaattttctttatttatagaacttatacaaattagtaagcaaagtctaacagcccaatttttaaatgatcaaataataagaataaggatttcataaagaaatatatacaaatggccaataaacatatgaaatgaggaaataaaataatggaacatcattattcttccataatataggaaaaaataattgctgctcagtgctggcaagaatgtgaggaaacgggtgttccagtactccatcgatgaaagtataaactggtgcaaactttctggagtgaaattcaatagtaactttcaaaatgttttaatgtataagctacttgaaatttataccagtaatgttgtcctaaaccttgatcaaactacatttacaagactagtcattgcaatgaagcttataatgcctataaaaataaaaactgtaagcgaccaacatgttcaccaatgaggaactgattaaataaatcattttacctacagagtgaaatagaaaaaaaagatatgtaaaaagaataaaggaaacctatatattctgaaattgataaatctacaagatcttttattaagtgaaaacaatctaggcacaaagcaaagtctgtgaattacggtcctttctgtgtaataaatagatggatgccagtatatctggaaagaattacaagaaacttttaacaatggaagctttgagaagggtagagagagggagacactcatgtcattgagtttgtgtatctaggaactagaggcaggttcaatactgccctcccagacattccttccctccacaggtgtttcagatctgccattctcccctaggctctatttgcaatcaaattttctcacgtggcagcaaagttgatgctacaatcccagctaacactcttctgctcctgaaccaaaatgaagagaaagatattaaaccttagtaaaatttcaacctttagtctagaaaatggcatagaaggattccaagactcagcttcaggaaagggcctatacctggcagcagtcgctgtatccagggaggtgacaaggggcctgactcagcttggatactatgccccatggtggccaaagggcacaaagcaccatgcctaaaaggctgacaggtaccccaccgtagactctaaccacataattcatcataagggagtatgtgtctctaaatgcaggaatgctaggcagacaaaaataatgcatggccgggttccatgtccccattgaactcccacctcccccagccacctcccccagctccacacctcctgctgccttctgtgggacatcctactccagtgtcagatgctattcagtgccctgataagctaagctgtgcggtcccaatgctcccaggatggagggtggaattctaaaaagactaacatagaattcaagctgccttcttagaggcctccagctgattggaggcagatcctcaggttactcaaaaatccaaaaattataaaagttcagacctcagacccagggttgagtgttttcttcctggaaggagagaagccatcatttgtgacctggagggtcacttaatgcttttggcccacatgttgctccaatgtttggaaaacccttgttctttcatcatcatgatgtgtcacaactagtcatggacatgtgtctaccccatctttccccatacacaaatctgacagcctcagtgtggagttcccagagagctctccctataagacttctttccagagtgagaactctccaaaataattttcttctaaggccctgtcctttgtccatacctgcactctaatgtcaggacaaatgggtaagaaaactatttgatgagtaccagttactccttatcaggcatgtgagagaaagagtctatgcactataatattcaatctattacctcattttacacatacaaatcttgacctaaccttcgggctgacatcctgccatccagctaccacagacattagcagttctgttacagcatccactttccatgtcaaacctgacttcgtacccattaagtatctcagggccattcactcatccattcatccttgaaacagacatgaatttccttctctgtgtgaattaccatgatgggagctcatagtgtagaaatgcctacaaaagcctctgtcctgaggtagagaaagtcaagtagccgataactctgataggaatcagcccagatgcttttggaggatatatgaggtaagctaactcacactcggctggggttggaggcatggggggagccagggaagacagctcccagaacatctgtatgagttgaaattcagatcagtagaagctggccaaatgaccaaggtggggaagtggtttccagcagagacagtacaacctgtgggaggcaggaaaacatgagggtgcacaacgggtctaaaaagggtactaggtagaccaggaggttgaagcccagagcacagccccgcttccctcatgaaccacaggaaagcttagccagggactccaagagttgttagtgagtgcccgggcaataattcagctgagaggaaacctggtttttctcaagagctctcagtcgtcacttcaactgcagctgtctgccctcagccttggccctccatgaaggaggctgtccttctaatccttcctacaccaagctctggagctggatcgtatgcagcatctggccccttcaaccgacccccacattaacacaccacatataattccatggggacccaaggaaggaaggaagggcagcaagaaaccattgactatgaatggaaggtgagaatcctgaaggaaggaaggaaggaaggaaggaaggaaggaaggaaggaaggaaggaaggaaggaaggaagggaaggaactcatccacatctgaatcctcggagtgtgttgtggaacttccctttaagttgactgagagtgtcagatgtgtgtctcgctatactctttcttctatattatgttcaattcttttgtattcacctgtaactttccggaagttctgcataacaacaaatatcatgatctgaaaaaactcaagtgcatgcctttttacataataatatgcttgccagcagctggacctgtcactagataactggctacattattttcatttcatggagatgccaaattctttccagccagagtcagagagtaccatcagccagccagcattttgctttgggtatgtaacatacatcgaggacaaactctctggaacaatcagaaaatctaatgttgcaaatttttgagaacaagccagataaacgtatgggtgctaacttacaaatgggcctctctgaagccagagaactgaaggctagaaaccccccttccatgtttctggctgttctgctgcaaaccagcaaagaagcagaaatcagccttgtttggttgtgtttttttcccaggaaggttcagggctgtcacaagtcctcacaatctctcgatgtctttctcccaaaaaacccacatggcttctagcacccaaggaggatagacaaggcagggatcctgtcaaggccacactttaaagagtcacagggagggctgctcacagatgtgagactccccagttcggccaaccttgagagaggaagactggcaccactcatcacaccaggcctccctcaagggcaagaggagattataaccaggaggctactgtccaagagaaaactgtggtgctttatgtatcctttatggtcggtcactacacagttgctacaaattcaccttggtttacagggactcactgctttctatggaatcgctgtttttacaataaggtcttgcaatgcaagttaaaaaccatcaggaatgcattagctctacgcatatggatgccgcgaatatggtgaataatagataatgtaattcatgcaatgaatatagcatacaaccctccaagtcttactaaaattctggatcgcagggtaacataaccaagccaatattcctgcaaggtctgcagatgtgaagaaacacaccaattactagagtaattgcaggaaaacaatacttcataaaagcaggaaaacacgcagccaaatttgtaactctgagatcaacataaaagatgatggttttcagaaataagtggacataagattattgaacttcattctttccccccaagaaagcaaattttttaaataaaatattcttctacaaagactgaaatagcttttttgttggctatcaatttaggcttaatgctagacaatgaatacaatgttactaaaatcctctgcatataataaaaaattgttaaacatattttttaaaacaaacttaaagaggtaaggcttagtgttatttagcacttcaaatgtggctagtccaaattaagatagctgtaagtgtaaattccaaaatggatttcaaaggcttagtgcaaaaacagactataaaatatctcatgcatttctaaacattggttacatgttaaaaaggtaattttgtcagattaaataaaatatatgattggccttaaaaaatcctctgcatatagtgagccgagattgcgccactgcagtccgcagtccggcctgggcgacagagcaagactccgtctcaaaaaaaaaaaaaaaaaatcctctgcatataaacactctagttgattttattgacacacattcattaaggaagattagctgagaatggaagcagccctttcctccactcagcctacagggacttctagaatagtgtgcacctgggagtaatggctcaccctataatctcagcactttggaaagccgaggtgggaggattggttgaatctaggggttccagaccagccctgtcaacataacaagacccatctctgtaaagatgaaatagaataaatagaataaataaaaatcaaaataagaaaatagaatgatatgtaaggcattctttctttcatgtgtgtctacggattctctctctccacatacacacacacaatgtaattttatacacacacacacacacacacacacacacatggcaatctgggcagagagtagccccaataaaataaaatggaaggactttattattgtacttagaaattctcagagagaatcaaactaagccacacagaaggatgtaaaggccagggagcagccaggagggcagagggcccacctccgtccctggacacacttcccattcattcccaaaccagtgtcaccctgctgatggtggcccagttccccagctcataatatttgactctttcttttctctttctttctttttttttttttttttttggaatctttctgtgtcacccagactggagtgcagtggcgtgatcttggtttactgcaacctccgcctgccgggttcaagtgattctcccgcctcagcctcctgagtagctgtgattacagggtgcatttaggctgagttccaaagaatgggcagaatttggatatggaaaataacttgctaatagtcccagcaagaatttgtcagggccagaatggggcgggccagtgacttgggtgctatgggcattgagaagccagagccattgggccttggaacctcttcctggatacaggagagacgggcaggtgtaagtgatcccagatgcggtcccaagaggactggagagtggaggcgccagtaaaaacccagagaaaaggtgggcctaagctcactgccaaagatgtgagaagaaaagcctcagaagacatgaagaggttgggatgatgcaaccacagattagccccacttgagtgaaaatggcttgaagcaggacaaaaactagcatgacccctgcccagaagcctctcagatgaacacagctcgaaagagctatatctggaaggcaaaggacatgtccaaaaccagtgtggtacttcaagaacactccacaactgcagcacgctccttcaaaagttacctctaaaagacaagcacagaaggaaccaaggctgtggaaagcaccgaggatgactactattattttttccttatagtcatggtgggtgaggaagaaaatccaggaatggcaggctaggcaggtgctggcatatagagagcacttgataaacatgaggagcacataaacagatgaagaatacatggatgagagatggcagggcaaaaatatagaattcatcaataccagctcgctttggggctggcttttgatatttgtaaacagtaaggtcatgaatacacaaccctggtttggatctgcaatctgctgcttactataacctaagataagccacttactatatttaaatctcattttcctcccctttacactggagccaatagcagtgtctgtgtcatattgtttggtgatgattttattaatatgttatccaatcttgtgtactcggcacactgtctgcattgaacaggtgctcaccaaagttagccatggccgtcgccaaactggaaatggtgcaaaaatatgtccagaagggctgaacaccctgaataggtgagggtttcatcagagaagctgaacttctgaaataagtttacatctcgaggctgatcaagcagctgcccagaaccccaaaattggggccgaagtcacacagcttctgtattcgtttgctaagggctgccataaccaaataccacaggcggggttgcttaaacaggaggccagaagtctgacattacagtgtctgaagagttgctttttcctgacacctctctccttggcttgcagatggtgacttctccctgtgtcctcacggggttgtccttctgtgtgcgtctgtgtactgttctcctctttttgtaaggacagcaatcaaagtggattagggcccaccctatcaaccccattttaacttagttgcctctttaaacactctatttccaaatactgtgacattttgagggactggggcttcaggcttcaacatacagatttgggggtggacagctgcctttggttactgagctgtcccagtgagtggatatcaggagattgaccatgacctagttttcacaagagcagattatggagactacagcacagtgaggttgactctgatccccagaaaaattatggggtgcattcttagacactggctttgaggtactttggaaaagaagccgcaattcccagaaacaacacaccttcacaggatcatcccaaagctccctcattaccttctttttcagtgaaattctcaagttagtaggcatttgctgagcacctactatgtaccaaagattatgctccgtcacaagtgacactctcataaggaaatcaggcagctgagccaataagggaatccacagtgccaaaactacgaaaaagaaggaagcgcatgtcaccgagattacactgagtatgaataattaattttatctaagagattgcaggggaggggttggtcaatggaagcctcctaaagaagataactagcctgggatttgaaggaaaaaaaaaactattccaagagaggaaagggcctggagttccccagcagctggcgggggtggtgtgcaggaaggggccccatcagccggggaggaagtatttccaaatgtgcagatacgttcagaaaaccatcacatgcttgttttccttcctggaatataaagtataaggaggtggtgtggaaggacaaaagagcaaaagggaagtcagaggtctttgctgtgccgacaagcctgaactttctcccctggtcacggggaatgagaggatgttcagaaacggagaaaagcccaaagcacatcttaagccatggtagggaaatggtgactgtatccactcatacagaaaggaagagtaagaacacatagagatactaggacctggaagtccatgcctgatgattgctctgagctctctggcctctgtttctccctgtgtgttggttccaattcgttttcttaccatctcccacccccttgatcccattccatgggctcccatcacaagccctgtcactcaacaagaagctgctcactcatccatacaaataccacgagtgccagggaactgccctcactatcccggtgggttacaggccatccgcatggccagagtagggggtgactgatcacctccactggaaccaggaataggagtggacaggaaggagcagctgcaaggcatggatggaggatcctggcgcagaccaactgatggacactcacccagcagttacgtgtctacagcagttctccgggcaacaaattatagagaaatcaataaggcagtggcaatgagaaaggaggtcaaaattgacagatatttaagaacaagaatgagctgtacttgggagccaactttttaaagtacatgtaacaggaaatagaggtagaactcaggtttctgacttgggagcttctgtgaatggagacatcactaattaaggaatcaggaataaagaaagagcaggcttgagggtgagataaagagtgcaggtttggcatcttaaacctgaattcatcctccagtctccagatggagattcacaggtcatttaggtcagaaagagagcttggaccaaagctagcagtgagagtcataagcctggttggggtgactgcaagccaggaggaaacaaggtggtgaagggtgaggagaagagcaaaggcatcttgaggaatgaggcttccattcaccttattaattcacgtgttttcattaggcatacatttggctatagtcctgggaatagattaggacaatacctaggaaagccaagacaggaaagtttgcagaaaacaccattcatgaagtgataaaacatcagcaagatgcaccagaagcccaaatcctggagtgtgcctttgagaagccacccgctgtcttctggatcctaacctaatagtcattatcaaaatcacatgatcgtctattctccagagccaaaatcaaagaattcttgcttattttctaggagacgttcaaaactcttggaccagagcatctgttgtggacagaggagaagctggacaaaagtccaaatatttcaagagtttgagatcaatggtccagccacttcgtttttgatactgagtattgttttctaaggtgggaaccaaggcctggctacacagggttgtttattctgaaattcagttggctttgaggtgtcccacccatttccactactgcactgtacaaagacacctcactttgtgcagagtgaattttgaactcttttgcctgggatttaccatgtcccataatacagcagcacacagcctcatttttcaccgtaacaattctgtcccaaccttgtctatttgtagataacaatgcacaatacatttcccccatctcaacatccccgaatgtctcaacacattaccaaagcagctcaaagtataaaattttatctaaatctcattccctcaaaagtcttaaattttaccatctaaatcagatgtgggtgaggctctgggtacaatccatccaggggcaaaattcctttccatctgtagatctgttcaagtagaaaatagggcatctgctcccaaaatacaatgggggtacaaacataggataccagttatatacattcagttcaaaaaagaagaaaatagaaaaaaaatgagtcacacataccaagcaattttaaggtccatctgtgcaaactgcattaggtattaatgcctggggataattctttgtggctcttaactccaccccctgagcttgaggctaggccctcaggaatcaaggctccatcctctgggcttgtagctctgccctctgattagccttcacttttcatataaagtagcctatgcttgcagctgagtaattttatcagtgtgctccttgccaggagactgtcgcagaaccaacagccctcttttgttttatactgtgtctcccttgtaatccaaactgtcagtgtttctgctgtataaaactctcaggaagcttataggtctcctgtgtatgtcatgaggattcactccatcagacaagagctcctccataggtttatcctaggtattcctgtctctatttttggcatttgccgagatggctatggtgcaatgctcccaagcttcctaggtatcctccagtttgatttagggaatctgtgagccacaaccttaatctcttccaggagacggttgtgtaactgaatactcttaacttttgattttttttcagagctattaggaaaaggttgcacaaccatgccttcagctttttctctagagcaggctttcctgacagtggatctcttaattttagcattttctgctatctggatgggttatttttaaaatcaagtcttgtttatttaatttaacatttattccatcagtctgtcttattcctcttgcattttactataagcagctggaagaaaccaggctgcaccttctcaaaactttgcttataaacttcctctgctgaatatccaagttcatttcttataagtctgctttccacacaacttcaggacacaattccaccaagctttcatccacaatataacaagggtctcctttcctccaggttccgataacaagatcctcatttctttctaagccttcaccaacagcagctgtaacatccatttttctattaagtctattcatgatgatttgggtgttctctaaggcaatttatgttttctcctatcatgttcttactcttttctgagccctcatgggcagagtcttttacaaccagatttatatgagcagtctatcatgctcctcaaagttctttcaacctctgcccattgccaatttcttttttctttctttctcttttttttttttttttttttttttgagacagagtttcagtcttgttacccaggcaggagtgcaatggtgcgatctcgggtcaccgcaacctccacctcccgggttcaagcaattctcctgccttaggctcccaagtagctgggattacaggcatgtgccaccatgcccggctaattttgtatttttagtagggacggggtttctccatgttggtcaggctggtctcaaactcctgacctcagatgatccacccgcctcggcctccctaagtgctgggattacaggcgtgagccactatgcccggcctccattgccaatttcaaagccctttatagttttaaaagctatgtatagttttttacatctgcatctcattcctgctatcaaagtctgtcttagttttatatggctactgtaacaaatgaccacaaattgagtggcttaaaatgacacatttattatcttacagttctcagagacaaagagttggaaattagttttcatgaactaaaatcagggtgtcagcagggctggttccttctggaggctccataagaaaatgattcctgccttttccagcttctagaagtcacctgtattccttggttggtggccccttcctccattttcaaaggcagcaatcaccatcactctggccttctgccagttatcacatctcttttcctgactctgactctctctctttcactctaaatccccttataattgcacttgactcacccaagtaatccaggatactttccctatatcaaggtcggctgattagcaaacttaattctatctgcaaactgaatttctctttaccatgcaagataacatattcttgtcatctggagattaggatagagacatgtttggagagccatcatctgtgatatggtttggatctgtgtccccatcaaacctcatgttgaattgtgatccccaatgctggaggtgggacctggtgagaggtgatttttgtcatggaggttgatccttcgtgaatagtttagcactatccccacgttgtactatccttgtgttagtgagttctcatgagatctggtcctttaacagtgtgtggcacctcctccctcactctcccttcctcttgctctggccatgtgaagtgctggctctcgcttcaccttccgccatgactgtaagtttcctgaggcctaaccagaagccagcagatgccagcatcatgcttcctgtataggctgcagaaccatgagtcaaataaacctcttttctttataaattacccagcctcgggcattttttatagcaatgtgagaacagactaatacatcctgcctacctcaacctcaaaggtgagtttgagctgccaccgtcgattctgaataactggttggacagaagggaagatcacatgcaaaacaaacagttttcatctcaaagttttagtgttcatttttttagaacttgagatagtacataggttcatagcaaacaattactcgtttagaattccctcttccggcccttgggaatcagagagtttagaagaatgagaactgtttggcatactagggagacatgtctttgagtcctcaaacattgatatttccgtttaaatactatgtgaccatcttgtgattatgtaattttaaaaacctacatactcattctttgacagtcacctagctgagacttcctgctgtactagttctgcaggtgagttggagctccttgtcagccctgtggactttatgggaaaataaagttcaaggaatctaggcaaaggtaaagttagaaattcaagtgtatatattcaaatttgaaaacattgatatattcataacttttccttaacttatacaattttcaaacaatgtctaattttcttttcttaaccacagaaaataaagccagccttcacagtgaggtaacctacactctagtgataacaatatctgcaccaaaacactcagcatttgttgaacacatgcaggctctgggctaagctacctgcatgcattctctcatctggggcagatcagagatgtctctgaatgataatgttaagtaagaaagaagaggccctatgagaaacagaaacttatgagaaacagaaacgagcatactaggtgccttgtgccttatgtgttatcttatttaatgctttcaacaacacttaaaataataacattttgtagatgaatgtataaggtgaatgaaggaaagtaactcttctaagttcccacagcaagatagtggtggaaaattgtgttattaaacacgactattttagagtcagctgattactaactttaatagttttttaaatttaattttttcttttttttgagacagagttttgaagatcccaacgtcttttctctacactctgctgtcttctaagaagtacaaggcaagtccttcggaaaacccacgagcaagacaccactgcatggcataactggagagagatttataggaggaaaggatagaattggtagggggagagtcagagaaaggacattcatgctaagctaacagaggagtgaggacaacagcatggctggagagagcttgagacgtatcagggaaaacaaggagtttgttcagctggacacagacacagggagaaagtaacggagcagcagcctgggtttgtcatcgggttccaatctaggggaccctgagtggaagcctatgaaatgcggccacttttaataggcaaaggggagctgctaaaaatacatgagcaaggagccgatatcatcacagctgcactacggaaagattctcctgactgcagggcataggtcacaggagaaggagaaactgggtgtgtgggatcaatgcaaaggaggctgcttgggtctccgtgaacggtgatgagggtctgaattatagggatggggatgagaagagaaaagagcagccagacgcccagcaggtgaggggctgcaggactgcaggacaaggcttggtaggctgtgacagctgctggaaggtgggaaacgtgagagggagcgcctgagaatgtctgaccaagcaggggtgggggagggaggttgcggggcttcccctggggaagcaggacgaagctggtgccccactgcaggaactgagaggccccagaggaaaagggaagtgagggcctggatctgagggaaagatcaggcctgcagataccaaatcatgcatcctgcatacaacgcagagctgagcacaatggagaggggacactggtgagggaagggggaggacctggcagactctttgatgaagcctgggttcggagggctagagggacagcagagccaataaaaggcctgggagaaggagctgtgggtcaggaggggagggaagctagtgcctggatgttgtgctcagtcccaagtagggtgctgagtgcacccacaacgctccacgctacagactccagcatccaccctacgacggacagatccctgcaggtgggaaaacagaggctcaaggccctcatgagattccgtggtccatgcacatggatcccacagcatggatgcctatgtcagtggcccatgccggcccccctcttctgactcctattatgccatgtccctctctatgtctgcaccccacttaatcgtttttttttaaattgtggtagaacatgtaacatgagatctacccctcttaatagatttttaagtgtacaatatagtgtcgtcatctatagacacaatgtttacaacaggtatctagaacgtacttgtctggcttaactgaatttttttttttttttttttttgagacggagttccactcttgttgcccaggctggagtgcagtggcgcgatctcggctcactgcaacctctgccttccggcttcaagtgattctcctgactcagcctcccgagtagcaaactgaaattttatactcatggattagcaactcccctcttccccctcccccaggccccagcaaccactattcttttcttctaggagtttgactattttagataacttatagaagtgagtctgtgccatgtttttccttatgtacctggcttatttcacttagcattatgtccttcagtttcattcatcattcatgttgtcacataagggaagagtttccttcttctttaaggctgaataatattcccgggtgtgtgtgtgtgtgtgtgtgtgtgtgtgtgtgtgtgtgtgtttgcagagtgctaacatcttttcaagatcataattccagtccttttgagtaaatgcccagaagtgagattgctggatttgctggtggttctatttataatttttttagaaacctccatactgtcttctgcaggagctccaccattttgcattcccaccaacagattacaagggctccattttttttcacatcttcaccaacattcatttgcttttttttaatataaaataatcttagtaggtatgagatggcatctcattgtgattgatttgcattttcttgatgattagtgatgttgggcatcttgttgtacacccactgacatttttatgtcttctttggagaaatgcatatttaagtcctgagatcatttttaaaattgggttgttagtttactttcaagttgcaagagttccttacaaattttggaaattaacctcttatcagatatgtggtttgtaaatattttctaccattctacagattgtcgttcactctatttattgtttattttgctatgcagaagctttgtaatttgatgtggccccacttagctgtgcttgcttttgttgagtacagttttggtgtcatatccatgaaattatcaccaaagacaatgtcatgaagctttccctcatgttttcttctaggagttatacagttttaagtcttatgtatactgagatttactcttgtctttataacactgcagagcctttgagccctaaataagggcaccattagctattgtgttacacatgcaggatcacagcagttacagagactcctagtggagcacacgcaatgcctggaacatgggtttgtgttgaatgaatgctgagttccctcctcattagctttcctgctatgacaaggcagggactacactgggataagtttctctttcccaatgacgcatgcctgggaaaagcaggcaccaacacctcacatggcagtaatctatggctttcaacactgtccagcaccaagacaaactgagatgagctggaaacatgtagctcaaaatgaagtgaatgagggtaaaagagctgagtcctcagttctccctcacttcctgcaatggcactgatgccagagctaaggggtacattttcttatctgttgatatggttggctgtgtccccacccaaatctcatcttgaattcccatgtaagtctcacgagatctcatggttttataaagaggagttcccctgcacaagttctctctctttgccttctgccatccatgtaaaatgcgacttgcttctccttgcctttcaccatgattgtgaggcattcccaaccacgtggaactgtcagtctattaaacttctttcttttgtaaattgcccagtctcgagtgtatcttcatcagcagcgtgaaaacagacttatacatcagtgttgtccctctccatgtctgtgaaatcccactaggaggtgaagctcagatacacttgtctcccccaggtttccaactcttccttcatacactattccttttctaagtctgccttctgtttctttctctatcattttccccttcatgtcaagaataaaagatgtctaccaagaaaactcaatattttccaaatagtggaaatcttacagaagtatgatttctgatcatgatgccaaaacactgtaaattaagacctccaaagagtaaagccaactagaaatcttaaaaacagtatgctaaataggtcctatgttaaagaggaaatttcatgtgaacactacatatcaccacctatgaggtacggcaacttaataattcaaggaacagttatggttttattggaaaatgatagaaattaaaaattaatgaactaagcattcaactcaagaagtctgaagttcttaggcaaggtagtatgaggaaaaaagaaaataataaataaaaaaggaagtctacagcagtcagccactaaagcaatcctaaagaaaatagaagaaaagaatgaagataattggaaaaaagttaaaaaaaaatagaaacacctcaaaagttagcagatttataaataaaatcgagagccaattctttgcaaacaactctaaaatacatgaatgtctaacaagtatgatacatatatatgtcgcattaagagtgataaaggcaccatcctttctggcaatatggaggactgtggtgtagttccactatatgctatacaaaaataaaaaagaaagaaagagaaatactggataaaagagaacaaaaaattgtttctttttcgttttaaatacatagcagcctcaaaataaggagaaatcaccagatggcagaaatgaagagggaattcaacgctgatcctgcaatagccaatgagagcattggacacaggtcccagtttggaactgaagcgcagggactaaacctgagctggaacaagacgtgcagccagtgacagtgcagggcagggaactggaattgagattcctatgcagcgttggaaccctcaagagccactctgccagggaaaacgggatgagaagttctctgtccactgtccctgaggagcagcgaggaagtggcattgagccagtgctgtctggtcctcagagaagtcaaaactcatgcctgtgtatcatatggttgtgggatccaaatgtgcaccatgtacatgacacagaaacatagaataaacatagtgaaatccaggaggagattttaagtttaattaacattaaataaaatttaaaaatccaatcctagagaagcgttaaccacatttcaagtgctcagaagccacatgtggccggtgtgtcacatgttggacagtacaggtgcagaatgtcatgaaagcagaaatttccaaggtcttcatcgatgccataaaacagggggatgaataaaagatttaaatattgaaacaaaagaaataaaagtatagttgtttccatgtaacagctacccaaagaatccaagtcaatccacttaataagtataagaaatgaatggcagagttcagtgtgggaggatgatacaaatagatatacaaagataaagatatatatttaaggaattactacttgcagaaggtgactaaatgaagcagccacacataacagcaacctcacatgtaaagtacataaagaataacctgtgactgtcttacaagagagagaaagggaaaaacttgctaaaccatagtatatggtgtcaatgcccagaaatgataactgtttaattttttacaggttctgacttaattaaagatatttttagtatcgaagatctcatactttaaaaaaaaaagaagaacctgaatgacaatatgccaggcatgtgaaggaaaccacaggctctcttgagagacacaaaagaagttctcaagaattggtgagaaatttactcctccttgggaagacttcagaaccacagtgataagaagagatatctgtaatcccagcactttgggaagccaaggtgggtggatcacaaggtcaggagttcaagactagcctggccaacatggtgaaacctcgtctctactaaaaatacaaaaattaacccggcacagtggcacacacctgtaatctcagctactcgggaggctgaggcaggagaattgcttgaacccaggaggcagaggttgcagtgagccgagatcatgccaccgcacttcagcctgggcaactgagcaagactccatctcgaaaaaaaaaaaaaaaaaaagatgcccttagctgagaacttaaggagaggcatcttttactgagaatctagtgtgtagtcggtgctttccatgaatcagcttatttaattcccattcctctgtgaaggtccagtaatagcccccaatccacagatgcaaacaccaaggcctgagatgagatggctaagcaatgagagaactgcatagtgagaggcagggccgggtgtgaaccaaagctgcaaggcacatcatcagagaaagcgcaggctattcaccgagtggtgttgggataacgaccactcatgcagggaaggcacagttaatcctctacctcacttcacagacaagatgctatctgcactaaagattcatagattttcacagatgatgaatgttgatacagtcccgagcatgcagtatttcagccccgcttgacggcatcggaacggtccttgagcctggaatgcttccttatcccaaggtaaaggctcctggaaggccgggctggacttgccaccttgtgtggcactatctttccctgttttgagcactaggggtgcggctttgctctgcatgagtgtgtgtgtcatggcacaacctaaacaacactccctactccctatacttagtctgtgccctgcaaggagaggagagaggagtcctgctgctgcagcacagagaggtgcattcactgcctcggcttccaggagggactcctggcctgggggaaccaccactgaagctgacctcccccatcccttctccaactgagcgaggcgttgctccagctcgtgcctgcctgtgtgtgctttccttggctacttcaataccaagatgcaggggacccggctgcttggacctctgctcatgataacaggcaacagatgtcacttgcttgacaatgaaagtactagaaaaaaataggaagataccttgttttagcaatcttagagcctagaaggtcttctgaagctagacacatgccagaagtcataaggaaagtggaaaaaccgagtacttaaaaatgcaaaattcggccgggtgtggtggctcacgcctgcaatcccagcgctttggaaggctgaggtgggcgaatcacctgaggtcaggagattgagaccagcctggccaacatggcgaaaccccatctctacgaaaaatacgaaaaaaaaaaaaaattagctgggcatggtggcgggcgcctataatcccagctactcgggaggctgaggcaggagaatcactaggaccctgggggtggaggttgcaatgagctgagatcgcgccactgcactccagctgggcgatagagtaagactcaatctcaaaaaaaaaaaaaaaggaagaaaaacaaacaaacaaaagcaaaattcgacttgcagaagacctatgaacagacttgaaagatgggtgcaggcagagttgcttgtgtgtgtttgggggtcaggagtttattgtgagatttagacacctcatggctggagggaagctgggaggggggcagaggagggagaggagagaggtggagggtcaggggagcccctaccaacccgtctgagcagccatgcacccccagcacccccaggctgccacaggaagtctcagagcaagactgtgttgctctgccaagccagagacggggatgccagggatgaggcgtggaggagagtgaggccccaccgcaatctcaccctgtgtgccctcctgtctcagaaacacggccttcagagagcagcgactgctgcttcctgccacctcccacatctcaggccagcgcctctttgcctcattcatatcatacaaggacagatttggggaaatagaattccaacttaaccaagttgacaaatggcaggctggaggcaaaatatttgcatgtcttaaaaagcaaagaagtacacgattaaagcagtaacaaagatggcatttttgcccacaagattgacataaaatttaaagattgaggacatttgtgttgctgatgctgtgaggaaattgtaattttcgcatgctcttggtggaagcgtaaacagacaccaacatttgagagggggaagagtgtgtcagttccaccatgttccatgtgcacaccctttgtcagagcaagggcatttctgtcctggaaagggcagcacacgtacgcacaggcaggatgacaggacgggcgaggcaattcatgtcagctatgattgtaacggctgacagcaacactaacaatagcaatagcctgcctttgtgccatgaaccacgatgcaatggtgttcaaaaggatgtggatgaaatgacgtaaagagaggcttgtgaatatgattaaattaacaaaaggaattgtcaagacagatacataggtggataggagggaggagaaggaggaagaggagtgagagagacaaggggctgtggcagtggggaagtgaaggcccctgagggaagctgcagatcagagaaaaaatggtttagaatttgatgggagaagggtcacatttggcttaaatgtgaattggcttgaatttgtgagaacgattatgtatttaatgttatgtacctaaatttaatttttaaattatgcatctaataaataacttaaaaataactaactttcaaaataatttaaaattcgtttatattagagtaaaagaatgaagcaaaatgaacatgaaagcaaataaaagaaggtaggaggagctaaaaggaagaagggagactgagcaaagagcgggagaggaaaatatttctctaaaaccaggatacaaatgatggcttccaagcaaaaaccgaaacaaccttttcatatttgggggcatccttctgagatgagcctcaactttccctactttacaaatgaggaaagtgagagggagaaagtgtaagaaatctaagaccaaagagagtgctatctacacctcaaccaaacagaattgtggggcacctttaaacaagatcctaaaaatgcttagatgtgttttatagttccccctaagtgaatttcaaccttcatcctcctcgttctctggagctatatggccacagctcccccgcctcccacaggccatagcatcaactcaaggtgaaaatgtaggtcgttccctgggcccaggatgcatcttctctgaaaacgggagcccctcccagcacgtgtgtctccctgagcagggcctggtgcacgctttgatctaaaccaatgtgacatttcccatgaggaaggggaaacctcattcagctacaacttgaactatttctttagggcaaccgagttattgatggccccatctatcttttttaagagcagtggaactctcaggcactttggaactgtcctgccagccagcaactttcctgtaccccctagatgcagtagcccgggaggtggtgaccctatgctgcgggctgagcatctttgctgttaatagtaatgatctcgtctatctattttgaatgagccagctatgggccctatgcaatatctcatttaactcctacaaacctccatttgtttattcgctgaataaatatttactgaacacctgtgatgttctaattacctggattagagcagtgaacaaaacagggctgtgccctccaggagctaacagattagagggcagtccgacaaatcacaaggcattggccaggcagcgttcacgtgttacaaggaagtaagaagggagctgattttatgtgtggggctaggggccatgtcctaggaggaagtctgtccagacaaatggatgatcagagtcagttggtcaacaaagcataaaggcagagggagagctgggttgccaggcatggaaaaatctaagaacataggcttagctttgcagtaagagacaacaaggggacggagagaaggagaatgagaacagggtggagcgccacacccataaactgcattcaagcagtccgccatgacagggctgagttcgaggcaagagtggtaccagagaggaaggtcccagggtaccctatgaagatgtaacgagagcgtgggggacttttggagggtttaagcagagggaggcaggatcacattcgcattttggaaggctgctctggctgtagtgcagagggtgcgttgggagggttcctgtctggagcagcagctgagagctgttgcagtcacccaggcccatcacagcaggagagggttgctgtgggaatggagagacctggatgcctgcaagagacacttctagtaacagcacaataaggtgaaagtttggatgttcaatgtggggaaacagaacagtcaagtaaaacacccaggtttctggctgaggaaacttggtcgatgttgccctattccctgagacagaaattctaggaggaaagacatgtttagggagcagataattgatttttattttgaacacatttgagttagagaaatccatgggacaaccaaatgtagtcgtctcatggacaagggtggcttatttgacccatagctcaagagaaagatctaggctgtaaacatagtttgggagattatcagaacaggttataattgaaatggcagatgtgccttagatggttcaagagtgtgtgcaagttgcaaagaagtcctcggacagcacccgaggagctctgaggttcagcgtccagggacaggaggatgaagtgacagacgcgtggtgtgggagcagcagaggtgtagcacgggcacggagcaggcgtgggcaccgaggacctgggacaagcccattttagggggagtgtggtgcatgatgggaaaggctccagggaaggtaaggaccaacaggggtgcaccggagttagcagctgtttcatggtagggcaaaatggaaccccaaggacagacagcaggggacagagtgggtggagaagtgaaagccgtgggtggaaacaatgatccccaagactggatgtaaaacatggggaatcaattgttctgggaaagaacaagctctgagagtgaaaaattaaaggggaatgagaagaaaatcatttgggaaggagaaggttagaaaatggggcatttgccgggcatagtggctcgtgcctgcaatcccagcattttgggaggtcaaggcaggcagaccacctgaggtcaggagttcaagacctgcctggccaacatggcaaaaccctatctctactaaaaatacaaaagaatagctgggtgtggtggtgtgtgcctgtagtctcagccactcaggaggctgaggcacaagaatcacttgaacccgggaggcagaggttgtagtgagcctagatcacaccagtgcactccagcctgggtgacagagtgagagtctgaaaaaaaaaaaaagaaggagaaagaaggagaaagaaagaaagaaagaagaaagaaagaaagaaagaaagaaagaagaaagagagagagagaaagaaagaaagaaagaaagaaagaaagaaagagagagagagagaaagaaagaaagaaagagaaaaagaaagagaaaagaaaggaagagaaaagaaagaaagagaaagaaggaaggaagggaagaaaagaagggagggagggagggaaggaagaaaggaaacaaatggggcattaattgagggccactgggtgccagacttgggggtacagagggaaaccatgcaccaggttccaaggatttccatgatgaggggtatggccaggtaaaaaggggaggacaaccaggagaggcaatgaaggatacaaagcaggaaagcacgcacctcttgcaaatcgaggaacgagagaatgggttgctagtgagaacaggcatggtgggaccttgcctcagtgcccttcatccaataatgcagaacaaaacacctcctgagaagcactttgtgagaagtctgcaggaagcttggcctcatggtggaagcaggtttcagttacgagtcaagcagagagactgaagatggggtgtgcttgtttgcatatcaggaacttggctcctgagaggttggtggagaggtgtgtggggggagggcatcgtgaggcagtgggaagcccagagcaatgagccctagggagcattctgaatcccctttttggggggcacaaggatttccacaatgccgtggagaaatctccatagctagagaataaaacaattacttccggccctcaacacaaatgccttaagtacaaacttgctttgaggacttagactgtgtcataaaatcacgtgagaattccacatcctgcttgcattagattcctgtggctgctgcaaaaaaagaaaaatcccacaaattgggtgtcttaagacaacggaactggattctctcgcagttcaggaggcagcagtctgagatcaaggcgtcagcagggtgggttccttctggtggctctagggaagaatccatccccagctcttggtggctgccggcagtccttggtgtttctgtcagacccagataagatccactctgtctaatgcaggagttggtcacagcactggcatcgtaatggctgggggcactgctagtggggagcattccatgtgaacttgcaagacgagcctaattagggagtcgattcacggtgagctgccaggtgaaagacactccttgtatagacaccacatgatttccaagctgttcgccggagacagtactttggcatttctctgccagtttcattattgccccaagatgtgtcctctccggagcactgtgctttttggatgcaattttctcattggtaaaatgggaaagtagcatctcacactaactttgggcctcactgtcaaggatgttagtgctttaatcactggaatttgggtcatcacaaggaggcttcaaagcaaaggctttgtgtcctgagagatggcagacactggcatgtaggaggtagcccagctcacgctgttgagagcagacatttactcagcacacaacattctggaagcagctaccaaacctgtgggggtgacccaagggtctctgcagagagagagcagaaagtgggctactggctgggacacagccttcttgtttgactagcaatgccactgttgcttgtcagcaacagaataaaacaagacccccaagtctcctaattactagtaagggtggtttggctccccaggctgtcctgccatcaccctaactagtgtcatagcttccacttcctcctcaccaattcatcctgcttgcagatgcctgattaattatctaaaaatgtacctttaggctgggcacggtggctcatgcctgcaatcccagcactttgggaggccgaggggggcggatcatgaggtcaagagatcgagaccatcctggccaacatggtgaaaacccatctctactaaaaatacaaaaattagccgggcgtggtggcatgcacctgtagtcccagctacttgggaggctgaggcagaattgcttgaacccggaaggcggaggttgcagtgagccaagattgcgccactgcactccagcctggtgacaagcgagactctgtctcaaaaataataataatggtaataataataataaataaataaaaatgtacctttagaccaagtcattcatccactcaaaaatcatcagcatcttgacatggtgttcacaactctataagccaacgacaaactaatgtttcaactgtatctctataatgccaagaatcttttgctgcagccaactctccaatgcagggggtccagtacggctacagctgtgcaggtttcacactacacatgtgggattgcagttcacatgtggtagactgtgcaaggtacccactggcaagtactcactatccactctcctcccgccaacctcaagcatgtcttatgccttccttgatccatgcttttgttattattacattgtttattgttttgttgttctgggatatgttttaatttacagaggaaaagtgtaatataggaaattcctccatacgttcttacctagaattaaacaatatttatcatatttaatatctataatatttgttttgattttttttttgagatggattctcactctgtcacccaggctggtgtgcagtggcacaatcttggctcactgtaacctccgtttccctggttcaagcaattctcctgcctcagcctcctgagtagctgggataacaggcgtgcaccaccacatccagctaatttttgtatttttagtagagatgggttttcaccatgttgtccaggctggtctcaaactcctgacctcaaatgatccacctgccttggtctcccaaagtgctgggattacaggcgtgagccaccgcacctggcatgttttggatttctaatagagcaattaaaatattacagacggagcggaagtccatttctttttcttttctttctttttttttttttttttttttttttttttgagacggagtctctctctgtcgcccaggctggagtgcagtggcacaatctcagctcactgcaagctctgcctcccgggttcacgccattctcctgcctcagcctcccgagtagctgggactgcaggtgcccgccaccacccccagctaatttgtttttttgtatttttagtggagacagggtttcactgtgttagccaggatggtgaagtccatttcttacctatctttacctccattcttttgctctctcctcctccagagttgcctctgttgtgaatttggcaagcatttttccaaccaactttttaatctttcaaatatacacctcatgcacaaaattggatcagtcaagaatcatttgcacacagcaaaaaactctctggctagtttaaacagaagaataaatgcattagggcattatgtcgttcccactagactagagaaacatgctgggagggcattcagccaggaacaagaccccacatcacaccaccagctgctctggtgaaagagcgaggttccagctgggtgcagtggctcactcctgtggtctcagcactttaggaggctgaggcagatggatcacttgaagccaggagttcaagaccagcctggccaatatggaaaaaccccatctctactaaaaatacaaaaattgaccaggcgtggtggcacatgcctgtactcccagctactcgggaggctgaggtaggagggtcacttgaacccgggaggtggaggttgcagtgagcgagatcatgccactgcactccagcctgggcgacagagcaagactccatctcaaaaaaaaaaaataaataaataaaaggtgaggctccactgcagccacagctgaaccctgccactggctagaccttctgaatgctgccccggaacctggacccacgtgtaggcacccaccacagccagcggcacgatgcaggccagcatccctgagtcatcagctgctgaggaagcctctgtggcaggtggacccaacaatctaactgaccaaaccaagggctggctccaagcctgaccagaatgtactggaaggaagagctatggtttcaggattgtttcattttataaattctttttttttctacttttctttttattattatactttaagttttagggcacatgtgcacaatgggcaggttagttacatatgtatacatgtgccatgctggtgagctgcacccactaactcgtcatctagcattaggtatatctcccaatgctatccctcccccctccccccaccccacaacagtccccagagtgtgatgttccccttcctgtgtccatgtgttctcattgttcaattcccacctatgggtgagaatatgcggtgtttggttttttgctcttgcgatagtttactgagaatgatgatttccagtttcatccatgtccctacaaaggacatgaactcatccttttttatggctgcatagtattccatggtgtatatgtgccacattttcttaatccagtctatcattgttggacatttgggttggttccaagtttttgctattgcgaatagtgctgcaataaacatacgtgtgcatgtgtctttatagcagcatgatttatagtcctttgggtatatacccagtaatgggatggctgggtcaaatggtatttctagttctagatacctgaggaatcgccacactgacttccagaatggttgaactagtttacagtcccacaccacacctattccaaaattgaccacatagttggaagtaaagctctcctcagcaaatgtaaaagaacagaaattataacaaactatctctcagaccacagtgcaatcaaactagaactcaggattaagaaactcactgaaaaccgcccaactacatggaaactgaacaacctgctcctgaatgactactgggtacataacgaaatgaaggcagaaataaagacgttctttgaaaccaacgagaacaaagacacaacataccagaatctctgggacacattcaaagcggtgtgtagagggaaatttatagcactaaatgcccacaacagaaagcaggaaagatccaaaattgacgccctaacatcacaattaaaagaactagaaaagcaagagcaaacacattcaaaagctagcagaaggcaagaaataactaaaatcagagcagaactgaaggaaatagagacacaaaaaacccttcaaaaagtaatgaatccaggagctggttttttgaaaggatcaacaaaattgatagaccgctagcaagactaatatagaaaaaaagagagaagaatcaaatagacgcaataaaaaatgataaaggggatatcatcaccgatcccacagaaatacaaactaccatcagagaatactacaaacacctctacacaaataaactagaaaatctagaagaaatggataaattcctcgaacatacactctcccaagactaaaccaggaagaatttgaatctctgaatagatcattttataaattctattaaaacaaagaagagcaggtagaaaggatgcgtgatgccctatgggcaaattatagtaacacagttgctcgttccaagtacatatgctctcaaatcagagtgaattgtaactaatgaaatgcactagttcagcacctaattttctgaagcatagacacaccatgttgaggcgtatgcaactgttatttttaatgtgaggccagagttattcctgacatttttacctttgttggacttcttgaaacaccatagcctcgtgccaaccaacatcaaggatttttgacttctggctcttcctccttccagacgttctaggattccaaatcttagttactttacaccctctaggagcacacagatttctgaataaacaaatgtctgtatagaatgaatatgaaattaatctatcataccagatataatggtaatcaatgacctaatgaaacctgatctttgaaatggtgtcaatcaaccagacacttgagagttggccactcgtttctagcttgctaattggtaaataggtgtttttgtttttgtttgagacggagtcgcccaggctggagtgcggtggctggatctcggctcactgcaagctccgcctcctggattcacgccattctcctgcctcagccccccaagtagctagaactacaggctcctaccaccacgcccagctaattttgtttttgtatttttagtagagatggggtttcacagtgttagccaggatggtctccatctcctgacctcgtgatccgcccgccttggcctcccaaagtgctgggattacaggcgtcagccaccacagccagccaaatgtgtgttttatacatgtcagagagggaagcaatcacagggagtagccctctccttacctacattctgggaaatggtggaaagccaggggaggcttttgaggggaggcgtgttgcaatgtgctcgggacttagccaaatctgagtagagaggcacattcagtgagagctccaacctgtcagaaatggccatctgtgtttgcaaaaggttcttcagatgctcgaataatgagggaagtaacccatgcatgctccactcactggggtggggtttgtttattgttgtttctcaacaacaataaaccacgtgacaggtgtgaggatcctgcagcatttatttccgcctgtagttccttccctttctagtgcctagctcctcagctctgcaaaacttctggctgggaggattttcaaagccacagccttttcccagcagagaagtcactccatgctcagaccatgttagaaaacaaaacagcactggccagaagtcacccagatagaaacggtgcccccagagagccttgaggtcacactaatgaagtgtcagccttagaggatatatatgcatgttcctcctgccttcttctttctaatgaagctggcatccagacctcaaagcctcaggacacgtccttcctatcttatctttatggccgtggtaaaatatacataacataaaatttaccatcttaaccatttttaagtgcacagttcattggcattgagttcattcactttgttgtatcaaccatcatcacctttcacctccagaactttgcatcttcccaaactgtactctgtcttcattaaacactaactccccatgttcctcctccgcagcctctggaagccaccattctactttttgtctttatgaatcagactattctagggacctcatagaagtggactcattcagcatttgtcctttcccttctggcacacttcacagagcatactgtcttcaaggttcatccatgttatgccctgtgtcaggaagtcttccttttcatggctgaataatattccattgcatataatacatttgtttatgcctttatccattcctatttatttttgtgtcaacaagaaagtccaaagaaaacaaaaaaataaataaaatgagataatttgatcacacatacataagaagaaaaaaatgggattgttctgccctatttcataccatccttgagcattcatggaagagtaagtccccggcactgactcacacatctccattccatctgcctgtggctaatgccaagagcatcatagtaaaaacaaacaaacaaaaattaccttttgtttcctgatactctgggaattaaataacacatgaaagtctgttctccactaataggtgagtgcagaacagcccatcagctccagctttccctgtgatggctgtctgagaagtggtaattgattagagacttgatagggaagaagagacagagctttaaatcatggggcttttcttaggacaaatgtaccttaatagagacttttggcagtggagcaaaaggacatgggttacctccaggactgaggtccccacaggaaggcagaaaatgaaggtgatagagaaactcagtgaagggctgggtgcagtgcctcactcctgtaatcccagcactttgggaggccgaggcaggaggatcacttaagcccaggagttccaaaccaacctgggcaacatggcgaaaccccgtctctactaaaaaaatataaaaattagccgggcatggtggtgcatgcctgtagtcccagctactcgggaggctgaggtgggagaatcacctgagcccaggaagttgaggctgcagtgagctatgatcacaccactgcactccagcctgggcaatagggcgagaccctgtctcaaaaaaaaaaaaagaaactaaatgatctctgaggagcatgcggggagaagggatgtggactaaagggtgtgctccacttcttgctctggaactttgaaagatgagcaggcctggcacttgaggcacaaacgaattttcacccagaaaatctaagaatccataaggaaatagagcaacccagttcactaagttttaaaaaaatgcatatcacaataaaatataaatatattggatgtatctataacggattcaattatcaactcatacacataattttcttatctgtaaggtaggaagagttgatagatttaaaatctttggaattgtagggatgcatttgagaatttcatgccaagctcctgctcttgcaaagaccctccttcaggtcttcacacagccagtcccttcctgaggctcagcttcagcttcaaggtcgcccctcagagggcacctcatggccggcccaggatctctacccccctcccccgcaccacccgcattctgttatatgcaatacagtgtcctgatcatttcctgatattttcttgtatatttggttatttatctaacttctccccccagaatatgagcctcatgagctcaaggagcttcaaaggagcctgcccacctttatcacttaccccccagcacatggaacaatgcactcagtaggcactcagtgaatattgaacagttaaggaattttcctgaagggccgcgtatccaaagcagatggatgatttcttgatttctttctttcttttttttttcctttctttgaggcagtctcactctgtcgccaagctggagtgcagtggtgcaatctcacctcactgcaacctctgcttcctgggttcaagcgattctcctgcctcagcctcccaagtagctgggactacaggcatgcgccaccacccccagctaatttttgtatttttagtagagacggggtttcaccatgttggccaggatggtctcgatctcttgacctcatgatccaccctcctcggcctcccaaagtgctaggattgtaggagtgagccaccgcgccaggcccagacgggtgatttcttcagtgacttccttggcaatgctttctgtaacgaggcggagtgtgcagtggacttgagtgtcagtctccatgtactgcctctcagcaatgcccacatccttctgaacatgctctgtgataagccacggaattgttctcagtatttctctccttcaaagtgcgaggcgaagctttcccagtagagggcgctggagggacacgcaggagaacaaggccgtctgttacttccagccggacataggtgtgaggaccacagtggctctgatatctcagcctggtgacatcctggcctcagccctctcgacagggaaaccaagcacctgcgcagccccctgtgctctgcagggccacaagccccccaacaccgcagggcctgtgctcatgaaggtgccccggtggctccagacccgccttgtcgtggccaagccggggcacctcctgcctcccctggctgaccacaccctctccagaaggtctggagacattcccagcccctccttccttgggcatctccctgagccctaggacagtggtccccagcctttttggcaccaaggaccaattttgtggaaggcaatttttccacagacccagggttggggagatggtttcaggatggttcaagcaccttacgtttattgtgcactttatttttattaaataaaaatacattgtaatatataatgaaatatttattgtaattgtaatatacgttgtaatataaaatgaaatagttatacaactcaccatcatatagaaccagtgggagccctgagcttgttttcctgcaagtagatggtcccatctgggggagatgggagacagtaacagatcatcaggcattagattctcgtaaggagcgtgcaacctagatccctcgcatgcccaggtcacaatagggttctcactcctgtgagattttaatgccgctgatctgacaggaagtggagctctggcagtaatgcgaatgatggggagcggctgtgaatacagatgaagcttcgcttgctcacctgcagctcacctgccgctgtgcagcccagttcctaacaggccacagactgatgctggtccatggccagggggttggggaccactgccctagggtaccctattgcatttccttatgtcttgtagttattcttttattgtggttagtagttctttatatgaaacttcccctgttttaccgaccctttgacctctctctcctcactgagttctaactgctgcaacacgaccactgtctccttctaaccactgcagccctgccctgaagcatgtcagctggagagagaaaattaggggactggttttcaggacaaacgttaatcagctaaacttgccagtgtctctttctgtaaaatatggtggggaaggtgaagataacctgcatgtaaagatgaactagcagcactagttgccaacccttatggagggatgaccacctaccagaccctcttctaagcacctcaccatattaactaatttaatccatgaaacagttaagccaagtaggttactagtctcagctccgtcttacagatgatgaaacgaagatgcagagagattgtgtagtaaggccaaggccacccagactacagcagaactcggactggaacccaagctggctgagtcaagaacccaagctctttatccttcacataacaatttaaacaagtgcacacaaaactggagacaccttcttttaaaactaccttaaaattaagagatatgcgttaaacacatcaacctgattgccaacggaaaaggggagaatgggagtgggagatgagggcaaaaagaaatgacaaattaatgaacgaataaacaaaaataagaatggggacttgcaaacgtgtgcatagctgtgatgcagggagtgacgagtgcagctaagccagcctctgtgtggggcaggtggacaggtgcatggggttcctaatggcagtgacaatgacagtgtcctctgcatcagaaggacacagggacacaaaaccccgatcagatgtggcaggaaggattctggccctgatgaagagtcactgaacctgcttgagaacaactctctgctggctccgtagatttacaaaaacagaactgcaagaaggtaagctctataagggcagggcattttgttcagtgtctagaacacagcctcagatgctcaatttttgctgaataaatgtgcaaatggatggactaggggtcagtgtctccctgggaggtcacaggctacgtgaaaaagctgagagcttgtagccaggagcattctctaaacccagagtggaggcagaggtcgaaatggatgaaggcaaaatacaatccagccaaccgtctacagcaagtctcctgctttttttccgatttagaatgtaaaacttttaaagagcacatgtattatcaatcatatttttacattaaatctggggataagcccccattgggtgtccaaataagctctttcccacttatctttttaccccttggagggggcagggtacctgaattttaatactaaattaaagcaaggaactgattttaaatgttaacaagaaattagcataaatcaagcaaagatgttatcttagaaatagttctgtttgcttttcactctagtcagaaataggtcttagaacctgcccggcatctggttgctagagcaagcactaaattgatatgtgcccccacaaggatgcccttaataaaatttttagagagacatttaaaagttgagcacacaggagtactaaaattgccatccacaatccaagcacatgacacgttttctaaagctagtgcttcttctagcactaattttgtctgtgtgacttaaccaagaaaaactccacactctcccttctttctctcctattttcagttacgccagaaaagatcaacttgcagcatgccagaaggtcttccctagcttttccaagcagcagtttgaatcttatatagaacattccataaccacggaacatttggttcgcgacgccaatttcttgaggatgaggagaaacacaactgcctctgccaaggtaccaccctctagagtcagtaagccaatacttaccacttcattttaaaacccatgcagtgctcacagatgtgattatataattacgatcaaatggcaacctgtgtgtgagtcctgaatcacttgtcctggaatggatagggctatttataatcacagcgaggctggggaacagagtaactgcggacaaaggcaactaatttctagcccagaggctgaggccgaaaggaagcctcatgatggggcggctgccagttgtgagcagaacagttcacaccggccagtggccaccggtgagtgacctcgcagagctgcagcttgagagcaatggacaagccttcccagggaattgtgagggagcggctcttagcaataaaccaccagctagccctggcacagagaggtgaggctgaaaagagccctaaggcatcttttcttgtattcacttgctgggttcagtattttggctccttacaaaagcacagattccaaacgaggagttttggagggggcagaggctcagtgataggaataaaatagttattttcatattcacagagctgagttttatttccaaggagggaaaattgggaactaaagcaggcaagcagtttattccccagaaggattactgcaaggacttacctgcattcagtggccagttgagcacgcgggccaagctgggctacagtaaagcaacgtcagcagaggcgtctatcatatagaatgcattggacaatggtttccattacaattaacagagttaattactctagaatttctgctttaaagatctctgactttcggccaggcgtggtggctcacacctgtaatcccagcactttgggaggccgaggcggactgatcacctgaggtcgagagtttgagaccagcctgactaacatggagaaaccccgtctctacaaaaatacaaaattagccaggtgtggtggtgcatgcctgtaatcccagctactcagaaggctaaggcaggagaattgcttgaacccaggaggcggaggttgcagtaagccgagatcacgccattgcactccagcctgggtaagaagagcaaaactccgtctcaaaaaaaaaaatctctgactttctgactccacggaatggagctaatatttgaaagacagatgttggagaagaattatcttagcagacatgaggaaagacctgactctcctgtcaacgtaatgagctcataaatacctccaccccttcaccgtgtgtcaagagaatgagacggctccttccagaccctgtgcccaactaatattgacactccagatcccttcctcgcctttttttttttttttggttatgatattcagcttttttttttaaccttttattttttttaattgacaaataataactgtacatgttcatgggggtacatagtgatgtttctggttttttgggttttttttttgagacagaatctcactctgtcgcccaggctggagtgtagtgacgcgatcttgtctcactgcagtctccgcctcccaggttcaagtgattctcctgcctcagcctcctgagtagctgagattacaggcacccaccaccatgcccggctaatttttgtatttttagtagagacagggtttcaccacattggccaggctggtcttgaactcctgacctcaagtgatctgcctgccttggcctcccaaagtgctgggattacaggcgtgagccaccacacccggcatgatatttcagtatgtaaaaggtacagtgatcagatcagggtaattagcgtaaccatcatctcaaatatgtatcatttatttgtgttgggaacattcaatgtcttccttctagctatttgaaactgtattattgtgaactagagtcatcctacagtcctgtagaatactagaaagtattcctctcctctagctgtaattttgtaaccttccacaaatctctccctccccctcccttccccctacccttctcagcctctagcatcctctgtcctactttttacttctatgagatcaactgcttttttgcttaaagggttctcatttcattccatatataactagccaaaaatcatttcaaagaattgttagctaattatcactaggccattaatattgagcaaccccaatttccttgggatttataaggcactataaattagtttcctgtggctgctgtaacaaattgacacaaacttagtggcttcgaataacagaatgtgtcctcttacagtacggaaactcagaagtgtaaaatcaaggtgttggcaaggctgcactgcttctggaggttttacagagggatccattccttgtctttctggggcctgggggctctgcactccttggctcctgctcccttcctgcatcttccaagtgcatccctgcaacctctggttccatccttacagctcctttttctgctggtgtcactattgtctgccgtttctaaggaggttgtgatcacacggagccaacccaaatcatccagaatcaccttccccatctcaagatccttaatttatcatatctgcaaagtcccttttgccatagaaggtaacatccccacaggttctggggactaaaatgtcggcatcttgggggacccattcttgaaactgccacaggcatctaccgtgaacctgtgtctactgtggagagctgaggatacacagactaaaaccccaccttctgtctcccgtgttctcccctcaacatccagaagaaccaagtggagtaactggtgccaggctagccctcctaccatcaacaatggaaaatgggaaaattatgtgaaacaactgcttgaagatgtaagacatcagacatggcagtactgtgagctgttggagagaaaaataagataagcactatgatttaccctgttttctgacttaaagtactttccgtatcatagcatagggaaggcaagcccatgcctgttttcattttgcctgggatgtccccatcccccacccctccttccccgggtcctccatcttctgctcctccttccagggttggagtttgccactttctttccctgtaaaagactttcacgactgggtgcggtggctcactcctgtaatcccagtactttgggaggccgaggtgggcagatcaggaggtcaggagttcgagaccagcctggccaacatggcgaaactccatctctactaaaaatacaaaaaattagccgggcatggtggcgtgtgcctataatcccagctacttgagaggctgaggcaggagaattgctagaacccaggaggcagaggttgcggtgagcagagatcgtgccactgcgctccagcctgggcgacagagcaagactccatctcaaaaaaaataaaaaaaataaaaaaataaaaaaactttcttcatccactgcgtagcagtgcatagtagtgcatagtaatcctgctgagcagagaagacaaagctcagagtttggttgctaagactatgggagtgggtggcacagagtacataaagcatggttggaggagcttcatggaggagctgcagaaacttatacaggggtctccttgagtctctgaatgaatcgtaagttggggatatataggatgagatttcacaaggccaggcaaagcttttagcaataaaccaccagctatccttggcacagggaggtgaggctgaaaagagctacgtagagattccagaacttgcaaagagccaagtgacgtaggagtaccaactcgccagaattcataggtctgaggaataccctaggagctcaattgaggcctcagaaatgccatgcctcagaaactgtggttctctagcctcatagtaaaagctactttatactcaccctaacatgcttaaaaataagactgaaagaatcatgctgaactacatacaaggaaattagctacttgccagaacaaaactcaggccaagtgtggtggctcatacctgtaatcccaacactttgggatgctgagacaggtgaatttcttgagttcaggagttcaaggccagcctgggcaacatggcaggaccccatctctacaaaaatatatataaaaattagccaggtgtggtggcatgtgcctatagtcccagccacttgggaggctgaggcaggaggatcatttgaggtggggtgttcaaggcttcagtgagctgtgttcacaccactgcacttcaccctgggtgacagaatgagaccctatctcaaaacaaaacaaaacaacaaaaaaaaaacacacacacaaaaaaacaaaacaacaacaacaacaaaaacctcaatgctcttcaaggaagacaatataatccagacactttacaagccagcattcacaatgtccagcataaaataaaaacttactagacatgcagacagacaggataattgacctgatacctggaggaaaatgtcattagaaaaagacccagacacaataagaagtataaaattatcacaccagaatcttgaagcagctattagaaatatgatcatagacttacaggaaaacacaagcataatgatgaaatataggggatctcaatcaagatacgggatctataaagaagagtggaaattctagagtagaaaaacaaaacatctgaaataaaatattcactggttgagtctaacagcaatatttacactatagaagaaaagatcattgaacttgaagactgggaaacagaaactatccaaacttaaaaacagagaggaaaaaggggagaaaaatgaacagggcctcagcaactgtgagaccaaatggagtggtccagtagacaagcaaatggagtcccagaagaagaggaaagagagattagagcaaaaaaaatttttttaaataatggccaaaatattttcagatttgataaaagatagaaacccactatctcagttcatttgggctgctataacaaaatattatcaactgagtggcttcaatgcaacagaaatttattttgcacaattctggaggcagagaagtccgagatcaaggcatcagtatctgggattataaggactctaatcccattcatgggggctctgctctcacgatctaaccacttcccagaggtaccacctaataccatcatattggtaattaagttttcaacgtaataattttggggaggacacaaacattagcacccacaaaccctcaggcagaatatcaccaaaaaacccacactgagatgtatcataatcacacttctgagaactagtgatgaaggtcatcttaaaagcatccagaaaaaaagagacgttacacactggagaacagtgataagaacgttctttttatcctaatcaaaccaaaaagaaggtcatatgtcagtgcaatgaaacatctttaaataacacaaagaataaaacaaatggacaacttagaattttacattcagcaaaaaaagctttcaaaaatagatatgcaaaaggggcattttcagaccccctcctccccccaaaaaagtcagagaacatttcatcagcacacctgaacaaccagagtaaaggaagttttacacacagaatgaaatgatactgggtggaaactcagaaaggtatagaggaacaaagaattccagaaatggcaaaaatgagttcaaaatgagggtaggtataaaagaatttctttttctgtgatgcctttaaaagttaatgggctgttaaaagcaaaaataacaattgtggggtttataacattttgtagaagtaaaatgtatgccataaatagcagaagggacagtggagggatggaattatactgccatatggttattacattatacacatacattatacacaaaattatataatatacttgaaggcagaatataagtttagagtgtctacagtcatcctcaatatccataggggattggatccaagaccctctgcagatactgaaatccaaggatgctcaaatcccttatataatgtggcgtagttggcatgtgaggtttgcatacagcctcacacatcctcctgtatgcattgcatcatctctagattacttatgatacctaatacaatgtaaatgtaaatagtcattatactgaatttcgaagtgtgtattatattgtattaatgttttaactatttatgatctgtggttggttgaatctgtgcatgtggaacctgtggttacggggggcccactgcattgtaaaccctgagccatcaccacaaggaaaagtgaaacagtctggagggaaagagagaggaggaaatcaacaactacagcaaagtgttactctcaatgtcaacagcacagacaggcacagggtgtggtgaacacagcgaggtcagccagcttttgcagaccttggtattaatgaagtatttccagagaaggtaccagacccagggaatgggacctggaggagaaagcctcagggggcagctccaagaagaaggaaaagcatgtgtgacagaaccaggctgtgagggagccagccttctacaggaagaagacccctctgagcctactgtgaaatcaccagcccaccagcaggagcaaagagtatagggaaaaaacacccaagtgaaagtatttgcatatttcaacagagaatgtgtgtgtgcacgtgtgtgtgtgtgtgtgtttgcacaagcacatttcacttcttggtcaagacattccacttcatggagttaaatctcttatcgccactctttccaatccctggcccccagaattactgattcttaattacaaagataagctgacaaagtccttacattaaagagggcttgctacagaaacacacccctgggcctaggaaggttcagtaatctaccccagtcaaacaggtggtgggagatggagctgagattaggactcaaagggctggactccagggtctgcactgttagactctgtgctctccttccccagtcataaacacggaggagacttctgctcctccttctgggcttggagtgtgtccctttccctggaagagactttcttcatccatggctttgtccccgtgagttggctgccttggttgcagcattggcaacaaagtctcttccagggaaaggggcacactccaagcctggaaggaggagcagaagtcagaggacccagggaaggaggggtttagggaaaggggatatcccaagcaaaatgaacagcggttgcactgacacagtggtgtgaacgcacctggctccttcaggatgatatatgggggaatggatacctgaagccaggagagagaggatgttggatggaatgaataatgaacaaggaaaactgttctgagaggtcacagattaaaataaacctagaatgtgttggccacctcttctcagaagtggataatgaacaaaactcttcttcaatcggttaagccaaaggcaaaagcctgggacatgcaaacgcccctccttttatgcagctaattatacccggagtccaggtgagactcgatgagttaatgaggatccactcaaagtctatcacggtccagagacagagctagacccagacatgtcccctgtcctcaccaagctcgtaggctaaaggaacacagacaaagcaagcaagcaagcaagtataatgcggcctggtaagtgccagatcgggatggttcccttttccaggcttgattccgcagaggcaaacctggacacaaggagttgagcacagcagttaatttgggatgtgagccaagaaacactcatggaggagcagggaaatgagacagagaaaggaaggaacccatgcacagtgcacagtgggcacctgggcccaaccccactggggacgtctaggaggctgcatacgtggtacatgcccccaggctgtactggcaagcagggaggagctgggtgtttagccactacctcccatccaccgctgaggaagggctgttcttgacacacaaatttgctgacatttagtgagcccctgttctaacatgcaatcctgtggcaggaggaggtggccctggggaagaaaatcaggggcaagggtcaatgcagccatcaggcaatatgggggttcaggaggcttcctggatgtgctggtgcttaagctaagagccagttgcaaagctggagtcagttgggcaaggagaatgaaggagtagcgtatccctggtaggaacggcactaaccatattcaccaaaactgcttatgtgtgtattttgttccccgcggggagtaaattccaatgattaggtcttattcatctttttataaaccttcctcaagtgtttgttccctttgggctgggccagaaaaatctaagataaagaagtgtggggctaggtacggtggctcaagcctataatcccagcactttgggaggctgaggcaggtggatcacctgaagtcaggactttgagaccagcctgatcaagaacatggtgaaaacccatctctactaaaaaaaaaatacaaaaattagccaggcatggtggtagatgcctgtaatcccagctactcgagaggctgaggcagaagaattgcttgaacccagaaggcagatgttgcagtgagctgagatctcaccactgcactccagcctgtacagagctagattccatctcaaaataataataataataataaaacaaagaaatgtaggacaagatgtaaaggcaacaactggtctaccacctgtctagcttcaggaagagatggccaccaaaaaagaatgatcaagatgaaactcttaccaccacaaagaaagtgtaaaaattgctggggggttacacaactttgagtggaagaggccatgcaatttgttttgaaaaaaaaaagtactattattttacaaaaccaaatatattgtttaattaaaatgtatagaatgcataacattctataagtggaatcacattatacatgccaaatttaaaaaaaaaatatccacaatatgctgtgggagctatttatactcataaacatagctctagaacgttctagaatatcatattgtatcagatttctatgcattctttttagcctatctataccttatggtctttaaagaaggctaatgcaagtaaatacctgctttcttttttcttcacttccttgaatgtttcttgcgttttctttgaaataagaagccattttcctcgagcatttattcacaccatagcctatgcaacaatgcaagacaccatggttttgtgggtccaggccattcctttatttggggggcctttgatgtcccagagcaagttctcaccagagctgacctcattgtttggacacaggatcctgccagacctaccttatactgacatctgctggtcatctcgaggtcatcttcagtaatagttaaaatggagaaagactttgagttgtttcccagagtatgctgaaatttttccctcagttttcaaggctttaaccaagacatgcaacaatttttctgggcagctatgtctgtaatagaatacatatctgttgggtcttgtttttctccatcttatgtcatctattgctgctacttgcaattggttagaccagctatcctcactcaacactatcccgggagcatttgtgatggaaaaaaaaaatgggaaacttacataaactgttccccatttttttgtttgttttcacaaattatcctcagatcctgagcttaggtcttccacagaatgaatataagggggatgggaggacagggagcatggagaagcgactttgagaagagcttgtgtccaatgccagctcctcactctccataacactgtgtcacagtggctccagccactcgtaagagccagtcccatcacaggaatttcagtggcagaaaactaaaatggttatccatcattctggaaaatagcttaaaactgaaaggcaaccttccagaacccgagttcctacaaaaagaaactcctcctagagagtgagcttctactccccttccatccgtgcctgccactccccactggtgcacccctgcccttgcccctcacatgacactgtggtcccagaaagcaattagactcccaggtcccgtggaactgggttcaaatcccctctccaagcctcatttgtgtgaacatgagttagtaataaaacttttctaagactctctttcctcaactgtaaaatacataaattacgataacaacacggaatggaaatgtggtcgtgaggactgagatggaatcactttccccctcagcctcgcagcagatgtccagcctctgctctctcccttttttggcttagtttccaagttttattcaagaactcatacaaaatattccggataaatgatgtctaatcctcatcttcctcctcttcttttttttttttggttaatttggaagtaacataatttgtaagtctctgtgctgttagtaacgagacacaatcaaacacagagattgttgctcaaatattttttggtgagatattgcaaataccatttggaaaaaaagcacctcctccttcctgcctcgttggcctgctccctgtgagagcctggatcttaaaagcaatctccaccttctcccacacctgcagtcaagatgttccccactatggcactgaagccactctcagcaagcccatctgtgacctattgatgatttttacgtcctcttctggcttgccttctgaggatttcatcgcacccacttccctagttttccttctgctccactccaggtcagacccctttactagatcttcctcctcaacccctttcagaaggggcagctcagaggtcacccttagatgcccatctttgactttcccctagttgaggtcccacagctgtattacctctatgctgatgatgcctataccagtagttcagccctacctctccctgagctccaggctcatatatccaactatttccaggacatctcttttggatgctgtgcgggacatttttacacaccacctcacatcctctcagcccacccttttgctccagctgttgctgtggtaaccagctgcacacaggaggggctgattccacctgcagcctgaggccacgcacacctctcggttctcccccaggacagcttggctgctgtaactgtggcacctgcaggagcccactcagtcagtcacagggggagccatcgtacacctggaagagtaagagagttgacacgcccaggcagcccttggtagggagtggaaactggtggtgatcctgtcccctcccacttcccagcaagacccagcccagatgtccacagcagggatcagctccagaacatactcagcgttgggcttccctcctcggtctcacttcttcccagtccctgagatcgctttcccacacaaataatatgcagctctgctcttctcaaaggatctgcttgtggggggaatccaaactaaggcccctcaaacataacagaaaatgttactcttccagcttcgtttctcccctgccccatcttcacatctcaacaaatggaactgatagcagtggtagcctgtctggagcagccactgggaagacggctgcagtggcggaggtatagccagggttgcacactctgcagggctggtgggagccaggaacaggcgggagcccagccacagctccagacccaggcatcccagtgctcttggaggcccgggaagtccctgcccctgcaggctcagaagtgcttgttctgctccagccatctggccgttcccctctacgggtgcctgttccagtgaggagcaaagttgtggcagagcctgggtgctgtcacaacccagctgggtgtgtgcatgctcagggtggtgctgacctgccagccccatgcagcttcattcctttcagaactttgagcatcaacaagcattggagggaggtgagggggggatgagggcaccttggcgtaggcctgcaggcacccctcagcatgaacagcctgggggccgtggatggtatgttgatggcagaaaggagagaggttcctgggtagaatggggtggcccctggtaaaaccccacctttaagccagggacaccctaaagcctggggggctgggctgccagttctgggtggagtctgcagctctgagtgagaagttatggtgttttttccaggcctgcccatggccactcatggaccaatcagcacgtacttcctcccttctgagcccataaaaacccctggacttacccagactcacatagatgtcgagactaccagctgcagaaaggagctacccattttgggtctcctcgactcatttgaatgacctccctgtgaaaaggagctatccactttgggtctcctgagagcttgttctgtcactcagtgaagctcctctccaccttgctcaccctccagttgtctgcatgcctcattctttctgcacactggacaagaactcaagacccactgaatggcaggacagaaagagctgtaattcaaacagggctgaaacacctgcccctgctcaccactgtgcgtgatgagaaggagaaaagagctgtggcccttcggggagcccagatctaggagctccccaagccagggctgtgacaccctctttggggatctgcagttcctggtgtctccaagcttccaggtgccactgtgttcccctcgtccagttgtgggtgcccacagcagaagccacatgcagtacatctggtccagccacagcttcgcacagagctagcacctgtgctggcacctggagctgcctgccccactgtagcagctggcatgcctggccatgcacagtggctggatgcccccaccacacaccccttgctgctccacacctggctgacccgtggtaggtgtgggatctgggctgatagcgtgagccaagcacaggctgccgggctgagtgggtgggacaagcccactgggtgcaagcaatactcaggcagaaagtgccaccgaccacagaggtttccagctggcgaagtgacagcccaaggatcccgtgacagaaccacatctgccccatgtctcatgtcaatcttaactcctcatgctttaccttgtcctgcagggtccatctatcagcaagatctaccagctctggcttcaaaatagtccccagatctgtccacctttctccgttcttctttctccgtcaggataacatagtccaagccacgaccatagcaacagactcctaacttgttcccccctcttccattctcagccccaacaatccttcctccaccaggcagccagagtggcctgttagtcttggagaggtaaacagtagcatatctttgccccactcagtgccctccaacggtgagccatcgaaagcctgctcagctctgagactgttgcaccctctcatggaaagttcaacaagagtgagcacaggttggacatgttgagtttactgtttattttatgacatacttccaaaaccctcttaaagagaatatcccgaatatattgtgctgcagaaaacatgcagcttcattccctgcctttactcacttttttacagtgttttctgtttctgctatatattattactctctggtctttttatcaataatcacttacacagaatatgggctgggaggatttctcaaagggaggtcctgaccatctgcagagcggatgtagtttggatgtgtgtcccctctaaatctcatgctgattgtaatctccagtgttggaggtggggcctggtgggaggtaggaggtgtttgggccatggagacggatccctcctggcttggtgacgtccatgtgacagtgagtgagtgcttgtgagatctggttgagatcttgcttgccctctgtctctcaccatgtgacacgcctactcccacttcaccttctaccatgagtaaaagctccctgaggcctccccagaagctgagcagatgccggcaccatgtctgtacagtccgcagaaccacgagccaattaaatctcttttcttcataaattgcccagtcttaggtattcctttatagcaatgcaagaacagcctaacacaaggtccaatgctgtcccctgcaccacatccttcccgagtcccctactacctccactgcccctttgagggctacacggctgcatttggcatctgcacatgggatcccctgcataagaaggagctgccactcatctgaacagcacaaacaggccacggcaggattcctcacatcttctgaaccttcacactgccttagcggcagtggctctccaaggcacccgctcatggaaaggggccctgtgtgatcctcaagcacccggggtcacccagtcctttctcctcagtttatgggtacaccagcctgtctgaagcccagacagtccacaggcatccagagcttagcaggtcactactcaaactcgtcatgatgatgcccattctgtaaatgagaaaatggagggagaggataaagaactggcctaaggtctcaaccgttgttcattgttgagtgcaagactgaatgccatagcccttgacaccacagctgctttctcctgctctgtgctaggaggccacagctgtccataccccaggacactgacctacaccagtgcatgtgaccaccgccacatgagatactgcctgcctcaggagtcactgtgcttcagaggacacctacacttgcacacaccacaaaagctcacacatgcattcacaacacacgcaacacacatgcacacacaacacatgcactcacaacacacatgcaacacaatacacacacgtgcacaacacacatgcacacttctgcacacaccacacatcatacatgcacatacacaacacaaccatgaccccaatacacagcacatatgcacacatgcgcatacatacatgcactcagcacatacacatacacacacggcccccacagaggttttgtgcttatgcttatgacccagagactattcaagtgcatgtggggtccatgcaatttctcctggccacctgccctccctcccgctcccacggcttcctctctactctctggaaagcagctgtggtgtcaagggctatagcattcagtcctgcactcaacagtgaacaacggttgagaccttaggccagttctttatcctctccctacattttctcatttacagaatgggcatcatcatgatgagcctgcaataaaaaattcacgcgatgttgctgagaccctcagtgcacttccacacgggcgcgcttgctccttcaacgattgccgcctctgtagcgcatcagatcccacttcacagggcaggtctcaggagatgggtgctgcgggcaccccgggttggagccagtttcccaaggcagagtgctcctgggctactgcttgactgatgagcacaaaccccgggacaggagggagggacaggggcagagcgaggctgcagagaggccgattgtcagtgtggactctgcaacagcctgtgcgatcccaggacagcaccctggaaggcttataaacctctcaggagcatcccttggggagtacaccccccttaccccacccagtcctcaaagaaggccacactgcatgggagtggctctgaagagggccctgtgtggtgacagcagggaagccctgggtgggaggcaagaggggcaggcgtgagcaggtggcgcactgtcgggtgcacacgtgcgaagctggtcagattcaccccaaaagaacacaaggtacagaagtgcctcgaggacctgaactggggcagaagaggctctgctacacccttgtttccaaatcaaatcatcatccctgcggagccctctggctgtccgtcctttgttttctttcttctcttgactcctgttacctccgcatttctcaactcttatggggaaagtttggacttttgaggatactgttagcccaaaaagcatcctttcattctgccagagaaattgaccatgctcagcatgctgggttccatctgcagagccactcacgctcccggcctggttccacgcccagcagtgtcgctgctgccgccatgtattctgttgctatcgttcctgtagttgtcagcactgtgttgtgttgctgtttgtggtggtggtggtggtggtgtttgagtcctgggatcactgcaaaccccagaattcttcagatccagagcttgctagaatttggaacaactgagtctgccatatccccttgttcccacagtatctagcatgtgcctgacacattgtgaatgaggattcattgagcaatgtccctgggggataaatatcattaaattggaagcaaataaaaaatggtagcagacatccaactcacctatttatgggtgactcccaggcatggaactggaaagccccaaattcccatggcatgcagagtatgcaccatgaggaactggacagagcaggaagtttaatgtgttggatgctgcccagcaggctgcatcctgcttggtgtgggtgagtgacacttgccactggaacttttcttgacccagaattcttcaaacattccattgtgggaatggctgcttttgatttcccttatggcttcagcctggattaaacccgggtgggggttgttatctgcacagggagccaagagtgtggggccacaggcagaggctgtgcaaggaattggaagttccttggccatcatctgtcggttgtggcttgcatggatgggctggccaggatgtggccccccttgtgccacagctccccaccctctgccaaagaaagtcaggttcacagaggcatttttttggtcttgtttcatttattgctgaattcctgggccctagaccagtgtctggctagcgcatgttgaataagtcattcaatcaatcaatcagtcaactggagacttagatgagctaagaattaagcagaccaaaatttttggctgcctacttaatattgcagaattaatcaaaactggtttttactgtgttcattttggacacctctatgtaatctctctctgtctctctctctttctctctctaccctccgccacccctctcacaaaaacaaaaacactacccattcactccttgaattataggaggatatgggaattgggatgaaaaattccccaatacttataaattccttcctgttctagtaccaccatctccaaacatctcattgggggcaaaaaaaataaaatttaaaattgtgtctgcatatgaaacctctcaaaaccgaaaagagaaaacaaggatttttccctctctctattttgaaattggcttaaaaaggagtttgagaaaatcttgtccatctgctgcccagccttcactctgctgagcattgctcagtcagggttacatgaagctgaagaaataatggaaaggcacagaaaacctcatcccaacccacaccgctaagcattttccaaaacagcactcttgccaaatgggcttttggcttcatccactcgaacaactttcttgctcactgctaagaggaggcgttttggcagggaaaggaatgcatggtgcgagtctgacattccattccagtggagacacagggtaagagacaggtgacgctacctagtgtcctctgtgcagagcgttcctcctgccacacactcatcctcctgtcagccagttccagcaggcagctgcctctctgccccacactgcccctagcagctgcttgctgatggattcatttcacggattgtgtgtttagggcatgcggtccgccaggcactgtggtaagtgcttgatgtatatgaactctatacaacctacaaggtcggtattactgttctgcctgttttacagatgaggaggctgaggtccaagtcagggaccttgcccaaggccacacggctgggagatgtcagagccaggatccctcctggggccttttggttccagctgtgggcttcccccgcacatggtgctctccctcctgtggccgcacctgcccgtatctcgcccctccagagcccaggtggccacagagctgatctgaccaaccctcctcctgaacaggagttggaagatggtctccagaacccaccccagcccacctggggccttccagaacccattcccttccatttgccatttaaactggagggcaagggctctcagaggagatgcttctggctacttgagaccaatacacatgcatcaaagagccagtacgtgccaggctccaccatggtaagtgttctcagcatgctggaaaaccttggacaattccttccctgtctcttgcttcagtccgaggaccgttgaaagactaagctggggctgggagccacggaggattttctgagcacactggaaagcccgaaggtcggcccagggtctcatggggaatattcaagaaggttcagggtcccatgtacccagttttaccgctgttggttaccactaacatttgctttgtgggccatttcaatatttatttggttataaatgcccacataagtagctctcggccccagggcaccatgacctttgaagcacttggtgctcggtgttggaaagcaaaccagagaagatggtcagtgacgtcttcatgtggagaaaagagaaggggaggatgcatctgaggcacttctggaaagaaagcaggacgggaaaaagagagctccacgtcttgaatataatcagggactcgggactccgcagcatgacctctacaggtgacctcacctgggaaagaaaggacgtggcttgaatcagttgtttgcaaccctgtctctcccccataaaacttctccatccaaagaaatcttactcagaagactgtctcagacctgcctgtgggaggattctctcgctagccagaaagtataggaccaatgcccgctggagattttaccatttgttttctccctctcacctgtgcccagacacccatagggtgaccgacctctgccctacggggatcctggcagtcccagcagcccagaaacccccatccaggtgccagggtcagaggcgcaggaatgtgtcacagactcctggcatgacaacaagtgtcgtggccgagacaatggccaggctgcctctgctatgaggcagtgcgtgttcttgcatcattatgtgttcccccagaacagaaacgaggggctggggctggccctcagacacaattctcctatttacttcctggggcagccataacaaagcaccacaagctgggggtgcttaaatgacaggaaggtactctctcagctggggatccagcatctagatgtgggcagagctgctcctcctgaggctcctcctaactctggtggttgctggtgatcaaagggcctcactgagttccctcaggggtggaaggtgctcctcaacaggcagcaggacctgcctcccagggctccccaactctccttagcaggaagaggcatcatgaaagtgggctcccataagtggcccaagtgccaagccctgggcgccatgcttgtgcaggacagtgcatttcctcttgttgatctgtgagggaaggatgacacgcccagtgtacagaggaggaaactgaggtcccaagaagccgagaaatgttactcaaagtcccacagttagacaggattgctcaaggcttatttgacttccaagtccttgttcttcctacagcaccaacctgccatttataatatgatgctgaatgcatttcctcctctagaggttgatcaaaactaaatcaggaaatcagtggtgcctacagaaaccagtgtttatgattcacatctttcaaggcaggaatgggaagcaaatgcttctgggggatcgcgatgacatggaggtgaattcctccagcaaatgtgattgtggagttaccgcgtggtgagataagtaggggagggcatctgggttaaaaatagacattaaaaaatgctcccgaacacagtttggagattgaaggtgtacaggaaactgggacactgatcaagccccagtgggacagactattccgaaggaagcccggaggagaaccatgactccacctgcccccttctgctggaggagtagaggcgtcctggcagcttcactcgctcaggcaggatggaggtgacataaatgtttcctgcaccaaagcattcagagctaggttaggaaagtacagacaagaagaaaggacagcagtcacaaaactggcctttctagttcttccttagatctcatagtgagctcagtagcaactggggtaaagtaggtgctcctacttcagcaaggacgaatcataagatgaccccatcccatcaccgagtcccctcattttccacctttctctcactggctccccaatcccaagtgtacctctgctccaacatccacccctcctcacttccacctttagcgcctacctgagtggatctcgctgggcctgtgaacccctcagccacaggtgctgtttctccagggccctccatggggtcctgggctttccagggctcctcatgccctaagcctactgaggacaagcctccaggagctaactgcacacagtgctcccacactctggatagacaaggtgttgtggtctctgtctagtaccacaggtcatgaggctgagacagtttcatcaagttcaaagacaggcactgatgatttgcttctgttaccctgtgagatttaaatgacagaatcatgtggctactctcattttttcccttcccttccctttcctttccttttctttcctttcatttcctttctgacacagggatttgctgtgtcacccaggctggagtacagcagtaccttctctgcttattgaagccttgatctcctaggctcaggtgatcctcccaccacagccccccaggcagctgggattacaagtacgtaccatcacacctggctaagtttttgtatttttcatagagccagggcctcactatgttgtccagtacggtctcgaactcctggactcaagcaatcctctcacctcagcctcacaaattgctgggattacaagcgtgagccactgtgcccagcttttttcttttcttttttttcttttttttttttggacagagtctcattctgttgctcaggctgagtgcattggtgtaatcatggctcactgtagccttgacctccgggctcaagtgaccctcctgcctcagccttctgagtagatgggattacaggtgtgtgccaccatgcctggctttttaaattattcttattatttgtataggtcttgaactcctgggctcaagcaatctacccacctcagcctcccaaagtgctgggattacaggtgtgaaccaccatgcccagccctcattctcatttattctgagaacgtgagaaattgtccaggaagccctcccttcctactcattaggtgaggtcacattctgccacctgccagacccactcagctctgtgcgcagtgccacgccaggcccactggagctgcccaagactgtggtcagcctctctgctcccatggaagcaactggagagaagagtgagaaatatgagtcaaaaagttgtgtggcgacgtggggtgggggatcctttcctgcaggacatgagaaaaatggatggtgaatggcagagtttgaggaggaccatatgtaggcacttgtctttctgtatctatgtcaaaaaagcataattttaagaaagaaattgagttctgtcattttaaaagtcggaaactttaatcaaactctacctctgctatctaccaggtatttgcaactctgaacaaattattttgcttatataagcctttatttcctcaacctgtaaacttgagataataagtcttgtttccctcacctcaaaaggttgctggatgagcctattatattgggaattaaatgtaggtttggttttttctggccaagtataaagcactgtaaaaatgcagggtatttactcttgccctatggtaaagagaaaattaaagtaattggtgctattatattctactcctagcttttgtgaaagatttagtgtagattatataaactcttaaaaagctttattgtatgttgatcaacaaaaacgtctgtttgaaagacgtgatgcctgaaaaagtaatatgtttattaaacctaataaatgcatctgtataaaagcatccagattctaccattttcaagggactgttgcaaagatccaagggcaccgtgaggctgcaaacctccttgaactctgaaaagcaattcacgtattagttgtggctgatattatgatgagtgcaagctgcaggcagcagcgtggccagccctgagtccaccagagggagacgaatcacaccactggaggctcaggggagacatcagctgtgagggggcagcaggatgattgccatgaaagggaggacaatggaagagaagggaggagatggacatggggttgggagagccacagggacagagagcatggagagccccaagcagagagtggcagaggggcactcagagacaccctcaccgcccctggtggataccgtttagctccctcaaaagacgaggagcgcttgagcagggaaggggagcccccagaagcatccagcccagcactggtcgggaactggaaccagccgctgaggctcccgttctaccccagggcactgacaagtcacgaggctgcaaatcctaggtatttacccacctcacttcctggtctttaagattgcagctgccaaaaccttgtcatcgtcctacgattgttttcaggggtttcagctcgactactttaatgcaatgacagtgtcacatttatatcctggaacccatccagatgctctggaggccagaacaccctgccaggagaggataatgaagcagatgacacctaagagggttgcaggcccagctgacaaccccctaccccagcctgagttggcaacctttggacatagtcctcagcttgggggcagaagaggctgctggggccccctgaggtgctgttgtcttctgaaagcttcctcattctggttgtgctgagcagggaggtcaaagcctcttactccaaaaagtcagcagatcattagtctaattagcataataaagctggcattttcgcttggctctgagcctggagttaagtagcttacagttgtgcagggtgtggactgcacaacccaacggttctcattcccatggacttgctagacatggcaccccccagaggctgttcagtgtccagcttgtttaaccctgagcagggtctggaagttagggacctacaggctatggtggtgtagggaggaaaatgggcttacctgctagtgaagactgcgggaggtcagtgtttagggaggaaagaaaatcaacaggaaatgtggaatacgcgtttcttccactctgttctccaggattttcattccttggccagttgcttccgggaatttattcccttgtctggaaataccatctctctgttgttccttgaaaacaaagaacagaaacataagagaaatcctttcattacctggtacagggctacccatggacacaatgaggggcctgtaggagcaaacaatgggggattcattgaccccactgaaagaaatacgcacaagcaggcgaaccaacccacatcttttttgttgttgttgtttatttgtttgttttgctttcacaatattctaaccgggaaaaaagcaagtttgattcacaggaggaaaaagcggttggagacttatgcaaactgttgtgatatttgcacccatattctaaaaaggaaccccgtgcatgccgacccctgcccacacaagcaagggggtctggagaaagtgagcatttgccatgaaagcggcaaggagggtttctaagatgcgacctgcttgcaaaccagcccaagcttcactgcaatgttcttttcaactgtttccaccattctgaaggtggatggcagatgagaccctggccagtctctgcagccgtggagacaaaaactacaggctcaagaacaaggactggtgctcagtgagaactgcccaactctccccagctcccccaaacccgctttgtccattaaacaatcgggaaacggagaaaaatatttgcagacacaatgtggtctgaggttgatacattcttatctagagtagattcatcttggataaacagacactgttcattttcctaagacacagggcatttcgtgcaggttcagtgacagagcggctggctgtttctgcaagtgggggtgcgtggagagggagatgcagaacagtcgcgtccccacttctgcaagctaactggttgtgcttctcgaaaaggctaccatccccgggagacactgcagcttcccctgtgaaaaggaacctcactatcccaaaatggcaccaaatgctcaaagacagtgtaggtgggtcagggcagccccaccctgccgctgctgcggagcggaacgagcttcctcttccttctaagattcaacaactactcattgagcatttaaccagtttctgccacttgccagttgtgcctcagtttcctcatctgtaaacaagggtgacaattgttagatctgccatgcatgatgttgcgaagattcaatgagctgatactgtagctgcttagaagaagccccggtcaacacagggctgtggtgaagattcaatgaactgatactgtagctgcttagaagaagccaggtcaacatggggctgtcacggagattcaatgagctgatactgtagctgcttagaggaagcccaggtcaacatggggctgtggtgaagattcaatgagctgatactgtaacggcttagaagaagccaggtcaacatggggctgtcatggagactcaataagctgatactgtagctgcttagaagaagtccagctcaacatggggcacatgcgctgtcagcctctatgaccacttgcggcatccaaaggccctgtgccacaaggtcagagcatgggatgtcatgggacagaattccaagcattaatctgtgagtctcctttgccctccatatgctttccttcatagcatcccaggggctcctcttaggaggaaatgagaagcaaaggctgcagatgctcacatcgagtgttcttggaaaggctgttgacctgagcgccagggagataattccagatgcgggcaccattggggttggttttctcctccctcctggtggggatggagggcacaggatgcaggtgaggtgaggaccgggaggacagggagttgtttgagaaaaacctgccagggttgatgagccctccctcagtcaagtagtcttggggaaactgagtcagtgtccaggggttctgcttgtggctggcttcatgggaccaccaaccaaaagcagccagccatagtctgtgtctcagaaaatgtccagcccctctggccattccacatggaagccccatccaatggtactggagagtcaccagtcctccagagcacaggtcgaggcagggggacttgacgagcagtctaggacagccggggaccagccatatgcctcaggggcagcagcgtgacacagcacctgtcctgaaggtgcttggggcaggaccaagtgaaagcctgcgtgagcacaggggggctggtgtgagagcagatgcaatgcggtttatggctaacgagccatcaagagatactgatgtgtatgggtgtgctgtgtatgtgtctgtatgtggtagtatgtgatgtgtttgtgtggtatgtagtatgtattgtgtgtgtgtagcattgcatgcgcaatgtgtgtgccgcgtgtggtgtgcaatgtgtgtgccatatgtgtggcgtgtgtgatgtgtgtgtgctatgtgtgtggtgtatagcgtgtgtgtcctgtgtgctgtttgcttgtgtgatgtgtggtatgtagtgttgtgtggtgagggagtatatatgatgtctgtgtggtgtgcaatgtgtgtgtctgggtgtgtgatatgtggtgtggtgggggagtatatatgatgtgtgtgtggtgtgcgatgtgtgtgtctgagtgtgtgatgtgtggtgtgtagtgtggtgtggtaagggagtgtatatgatgtgtgtgcggtatgcaatgtgtgtgtctgagtatgtgatgtctggtgtgtagtgttgtgtggtgagggagtgtatatgatgtgtgtgtggtgtgtgatgtatgtgtctgggtgtgtgatgtgaggtgtgtagtgtggtgtggcgagacagtgtgtaagtgtgatgtgtgcttgtgtgtgtggaggttgagtgtctccatgtgtgtgtgtgtgatgggggagaatggggtctctgagcttggggtggtcagggaaaccttcctgtgtgcaccaggacctggtgaggcttctccagcaggaggagaaatggaacccgatatgagcagctgttggggaaaaaagcccaagatcactttcaacaatgcagttgtggagcacaggtcaaggcttggaagaatggaggatgccactacctgagtaactaaggaatgtttcctcatttgtggggtggtcacggtgaaagtacctttgggttgttgtgggttaggagaacctaactgctgcagctgtcacatctgctacccagaaagggctctgaagagttgctactgaagcccctgatgatactgttcatccatcataccctgcaacgtcgttattttaatattgtaagctattaatgcagtaaaatactttattcaagtattgaaatcatctaagcttcctattccctagagatgcatgaataacagagctctgatgcttatttaagtttgtataggattttacattttgcaaaatattctcaaatacaaaatcatctcatatcagttaccttcccccaccactgccaattagtctctggctagtgatgtaacccttatgtaccccagattcctcatctgttaaaatcaggttgatgggaggattaaatgacttagtaaaggtaaagcgttggcatttgtatacagtaagtgctcaataaatgttagccagcaacaataagtgttgcttctccgggtaagttctctgctttacctgagatgcttggtcctggggttccagagtcagtcaccctcattgatagaagacagacatgaaagtgggcctgagaacatgcaaaggacataaaaaggaagaaaggagagagaaagtgagagagggaaagagtgagagaaagagagggagagagaagggagagagagagagattgagattgaaggccagtgaggtcatgtgcagaaaagatagccaagatcaccaaaccacggatggccccatatacatgcaatttccattttcctcttctgttttctttcccagcagaatttgcaagcatatggaagtcaagacctaagcccagtatcttcctgtgttgtctctggctggagggacaatagaagatcatttaacctgaatgtccacattgagatctgttcatactaacagcactttcagaattgtatatattaacagccccattttttatagatatggtagcacaaaatattaaatatggaaagtgggtgtattagtctgttctcatgctgctataaggacatacctgagactgggtaatttataaaggaaggaagtttaattgactcacagttatgcaggactagggaggcctcaggaaacttagaaggggaagctaacacttccttcttcacatggcggcagcaaggagaagaatgggtgctcagagaagggggaagtccctgataaaaccatcagctctcatgagaactcactcacaagagtgagaacaggatgggggaaactgcccccatgattcagttttctctacctggtccttcccaggacacatggggattatgggaactataattcaagatgaaattttgggtggggacacagccaaaccttatcagtaggcataggaagaaataagtggacttaaaagaattatgccttaaaaaaacaaaataccctgtaaatcaactgggtttacatgaacaaataaaagaggagttacacaaaatcctatgtatttagtgacaaaagacaatgaaaaaattgtgttttcagtcttctgtcccagatcagaagtttgagggcctgctcatttgaaaatgactttttaaaacccatgaagttatttttaatggaagtcttacttattaaagattcttgttgctatctgcagatcccaaacaagattctttggcgtcctcagcttgctcttctccctttccttggtagacttttctctttgtctgtacttcaagtgcctcctgccaagtagaaaatgaagagtcagtccgtgtgctgggctcagagccctgccgttttagtggcttcatggatggcttggcacaactagggagcaatggtgtctcccacacctgagatggaccctgttggactcagagtggccagcaggatgtgggttgaccccagtagcacattaagctcagcccagagtggcaggaactgaggcggccaggagaatgtgcaagggccacccagactgtaggacaagctaggaatccagtaaagaagagggccctggcagttcctttggaatccctgtgattccttctttcattcatggcttcattcattcaacaaatatgtattgagcacttgtgacatgccaccttctgttttgggtattcaggatacatcagtcaacagaataggcaaagattgattgctaccctcgtggagcttatgtgctggggagggaggtatgcagggagacagggcacagtgagatggtgaaagtccacagcaaacacaatgagccatccatttgtgtggtctgttataaaatgattagagctgtggaaggacagaagaaaggaaagaggaagagagggagggaggaagggagggagggacaaatggagagaaggaaggaaagaaagacagggagggaagaaaggaaagagaaagaaaaagaaagagagagagaaaagaaaagaaagagaaagaaaggaaggaaggaagagaaaaggaaaggaaagaaagaaaagagggagggggaaaggaagagaagaaggaagggaaagaaaggaaaggaaaaaagaaaggaaggcaggcaaacaggcaggtagaaagaaggaagaaaaaaaggaaagaggaaaatgaaaaccatagggagtcagggagtgcctgggccaaggcagggaggaaggggcctggctgtgactggaaatgggaggtgccctctgggcaaggacttgaggaattgtaggagtgttcgtcctggagccatccagcaggtagccttccaggtagaagtaaggggctgcaaggaggccttaagggtacagcccacctgatcattccccagagtcgcaatgaggctggaggcctgaggggctggagcagaacagattgcagtgggagagcaagggggcttatggaccacagagggcctcaaggaccactgtaagatgcagtcccatgggaaccattgcaggcttttaaacagaggagggacactctgtgccatattttaacaagatcactggggccgctgggcagagaacagaccatggggacaagggtggaggccagagacctgctggaggctgtggcaggtgagggaggatgggagctggggccaggtggctgtggagaggtgagaagcggttggtcagtttctggtaaaggtcgaaggtagatccagcatgactcctgacggctggatgtgtggtgtgagaaaaagaagagtcaagggtgtctccaaactgtggtctgaacagcaagagggacagatgggacctgtggctgaggtgaggaggatggcaggtagggaagagaggggatgacagagcagaaattccatgtggatgctgtagaatctgagatggatgtgaggaaagcccagtggactatcaaagaggcagagggtataagagtagtgggcattcaggagaggtctgagctggaactaaaacagatgagatattttgagtcatgattgaaatgtgggtgagatccccagagatcaacaatggacggggcgcaggaaagaaccagggactgcaccctggcatctccagcactaagaagtggaggagaagaggaggaacccacaaaagaacctgcgaaggagggactcagaggaaagagaaaaaccaagagaaagacattgcagaaatcaagagaatggagttagagtggtcagcactgcatcaaatattgccaagggttcaggtcagatggggactggggtttgaagatgattccaagttttattcaagaactaatataaaatactccattctggagtttgcagccaaagattttttttttttttttttgagacagtcttgctctgtcgcccaggctggagcgcagtggtacaatctcggctcactataacctccgcctcctgggttcaagtgattctcctgcctcagcctcccaagtagctgggactataggcacgtgccaccatgcacagctaatttttgtatttttagtagagacagaatttcaccatgttggccaggatggtcttggtatcttgacctcgtgatcctctgcctcagcccctcaaagtgctgggattacaggcctgagtcaccgtgtccagcccaaagtccttccttgggttatggaagcttattcccagcttggtttccatcaagttcaatgtccaatgaggtggcagctgagacttgaggatatgacgtgtttacctttgaactttgcgtacaaaataccccagctgaaggtccctcacagagagtttggaaaataaaaacactacgaccatcacattcccaagcagaaggaaagacaaattcatgagcaaatcaccacattcataaacagaaagccaccagccttcaagaagagataaggcaaggctgttctcatttcatgggacgttgttactgttctactgttcatctctataaagtatagatacatgaaagtattttttttcaaacgcaaataaaagttcttctcttaaatgaaaataacctaaaaacagcaataaagcctaaaagaaatgtgctgccctcaaattcttcctgacgttataccacggatctgattctccagggctggaatccagtgtttccacccaggaggggcaagttccttcacttccctgggtgttgatggtctcacttataggttggggatagcacccacaatccacagttccttaagaattttttgagactgagtgatttgtggctggtaaacagtaatgaggatgatagtgattacctagctttaaacagatttcccaaggagataagtttctaccaaggttctttgccttgtcagaaagctccaaaggctgaatggcgggcgtcccagctcccagatccccatcctgataaaaccctggtgtgcccaccccgagtttcccaagtgactccaaagagaatgttacccagaggagagcaactggctcccagatctgtaggagaacttttgacattttctcatcatcatgcaagggactgaggctctttgcaggatatggatggctcaagggaactaataggaacagtggcgtgtggttccaatcccacgtctgcagtttaaaaacaaatggctgcaattgcattgtgtacacaggcctacatcctcctctctgctccggggagaagaataaaggtgtgactttctttgttaagtgctttcttccctaccctggaatcagcctccacccacctgaaagggagggaagaggaggagccccaaccttccagaagaaaaagcaaacaaattccaccctccaaacccaacccaacccaacccaacgctaggaagccaggttccatttgtgtggcttagcacagagggacaccaccccagcttccggtttaagtttatgtaaaaagagtttaaaaatatgtctgaacctatattatcccatcaccatcaggaatagtaattagtattaattaaaataatacccagtgactagggcttaaaacgtaccagctttatgtgaggtgattgacatgtattcctacctaatttcacaaatatttgatgaactgggccctatctcccatttaacagaggaggaagccaaggtgtgaagagtggatatggtgtgctggggagcacacagctggtggatcctgagtaacaatgcagtccttggggtgacctcccttccccctccctgttaagctctctcccactctccacccccaacctctgctctcatcacacgccagccccacccacaccccggccagactctttttcttttttccttcccttttccctctcattcttaccctactcctccaactcaaagagttagttgacggctggatgtggtggctcacgcctgtaatcccagcactttgggaagtcaaggcgggtggactgcctaagctctggagtttgagaccagcctggacaacatggtgaaaccctgtctctactaaaaaaaaaaaaaaaaaaaaaaaaattggctgagcgcggatgtgggcacctgtaattccagctacttaggaggctgaggcaggagaatcgcttaaacccgggaggcggaatttgcagtgagccgagatcatgtcactgcactccagactgggtgacaaagtgaaactccatcttaaaaaagaaaaaaaataaaaataaaattaaagtatagcacgtacaattatatacagcatgtaatacttggtaataataataaacaactattttactgatttatcaatttgctatacttctaatcattattttagagggtactccttccaattataaaaataagttaactgtaaacagcctcatgcaggtcctccaggaggtatccagaagcaggcgttgttatcacaggagacattatcgcccctgaagaccttccagtgggacaagatgtgtaggcagaagaccgtgacactgagaatcctgaccccatgtaggcctaggctaatgtgtgtatgtgtcttggtttttaatgaaacagtttacaaagtaaataaacaaaataaaaaattttttaaatggagaaaagtttatagaattaggatgtaaagaaaatatttctgtacagctgtataatgtgtttgtattttaagttatgattataaaagtcaaaaagttaaaaataataaagtgtataaagtacaagttatagtcagctaaaattaatttattattgaaggaagaaaaaatttttttttgaaggaagaaaaatttttaaataaatttagtgtaacctgagtgtgtagtgcttataatgtctacagtagtggacggtaaagtccctggccttcacattcacacacaacttagtcactctcccagagcaacatccagtcctgcaagctccatccacagtaagtgccctacacgggtgtcccattttttaccttctatagtgtatttttactctatcttttctatgtttagatatgtttagatacacaagtatttaccattattttgcaattgtctacagtattcagtacaatcacatgttttacagatttgtagtgtagcagcagcagtccataccatatggcctaggtgcgtagtaggctatgacatctaggcatgtgtgagtatattgcatgttgttcacacaatgatgaaatctcctgatgacatatttcttagagtgtattccattattaagcaatgcctgactgtactttttttctggtcatgttatccacaattgttcagattcattcgtttcacttatatgactgtttctcagatacttcaccttctttttcttgaattcctccttctgattcattttgtccattgggttgatgtattttgtgagtaaaaatacagtgatggcacatggaaggtaaaccatactttttctgcttcctcccacaagacagatagttgggctggatatagaattctggagtgtgtcactttccctgggatctgttgctctagtgtttgctaccatctagtcttccagagagtctcatgccagccggacacacatttaaacaatttctctttatcttttgaattcttaagtgtcttttaaaataaccccccaagcatttggcaaacattgttgatctgatgtcttcagctcaaggaaaacttcttgttcctttgatctttgttttacctccaccatttctgttctcttttcttggactcctgtgacatggaaggaaaagtctcctggatctctttttgttcctttcttcatttccatctctttgcttttttgttcagaggctgtgataatgccttaaattacactaaaccgatacttcacgacatcagattttagcttagtcccttctgccatttactacgtccactcagcttttcttttactctcaaaaattatacttttatctccagtgattattttttagctcctattgctcttttattttttttaagtaaaagctcttatttccttgatagaatagcttctaaaatctacctgagagggggaaatgtagaatgatttcttaggttctccagggccctctcagctcagtggccctccctcagctgcggatcccatgtgctggggtctttttaccatctacacatattgatatgtgccagctaaggtggatgaatttgggcagctagtgtgggctctctctgtcagtagtttaataggagtctttgggagacagtgaagggaatggaattgtgggcaagggtagcgggcacactcccctttgggtgtggtgcagaggtaggatggaggcaggcgggataaaggctgagctccaatgcgggtaggatggaggcaggcaggataaaggctgagctccaatgtgccgggtggcagctggcacttgagccagctaagtggctgtggaaggtcaatctgcaggccaaggctggatagtcaccttctgtgggggacactgtggtggaattattgaggttctctaattaattctcccacaactgccccaggtttacctttcctgacccccaaccccacttctggcctctgcactggtgagatcttagggctttctctgagagggcgctggaaagtccagagaagcacatgcaaagccgagcctaagagcatttcacggctgccgggggtctcttctcccaccttttacatcacagcatcagcatcgtaaggtgaactgcagcaccgccctcttctcttggggttcctgttgtcggctaagggccctgccaggccagatgccccgaagcacttgatctcattaaactgatcgaatttaaacaggaccagccaggggttccgaaactctgctgagcacaagaatctcccggggagggtgtgaacatgcagatgcccagctgcgccctgcagtctgacttgcattttctcttgccctttcttccttattttcccccttccctccctccttcactgttttacttttttcctctgatcaactcataaatctgcccaaaggacaatctccaaatggtccctgtgaaaacagacacttttgcaggctctagcttccattggtcttcctccagatttttaccagggaaggggagagatgaagactttcagaaaatgaccacataaatacaatacattcttgaaacacttgtgttgccaaaggagtcagtctgctgtggccagcaacccacttcagattttgccactccaggattcctcattcctgcttgcgttggcattaataccaattagtcacgatgatctgaaagcccccgcgaattccagaaggatgctgcatgttctaaagacaattccattccctcacctaggcttcaccactgcacaattcatccacgttacccaaaaccactggtaccccccaaaagtacagaggggatactttaatatatatagaaatatatattacatatatatatatatatatatatatatatatatatatatataaaattaaacactcaaagaactacatacctaaaaaggtgaaatttgctttatgtaaaccatgtctcaataaacgtaatataaaagaaagaaaaggggctgggcgctgtggctcatgcctgtaatcctagcactttgggaggccaaggcgggcagaccatgaggtcaggagatcgagaccatcctggctaacacggtgaaaccccgtctctaccaaaaatacaacaaattagccgggcatggtggcaggcacctgtagtcccagctactcaggaggctgaggcaggagaatggcgtgaatctgggagcggaggttgcagtgagccgagatcgcgccactgcactccagcctgggagacacagcgagactgcctctcaaaaaaaaaaaaagaaagaaagaaaagaaatggacagtgttcttggtgcgctgggaaaggtggaacagtgcagttacagagtgggaaacagagggcattcagaccaagcccaagaaataaggaggtcaggcagtcgacataggcaccccaaaagtcacagatacacatagccaagggggtcacaggcttaaaaccctagatgacactctcaggaaaggaaaaccagtgtctgctgagcgactgctatgttccaagtgttgcccagtttcaccagctctaatgatactaggatacatgcctcgaccaaaagaaccatcctttcatgtactactaaaagcatgctaccattaaaccatgatactttattattattatttaggatttctgttttgtatgtatgaagaaggctgggccctatttagacattcttatataaacattatatataggtgaaatcaattgttaaatcattcctaacattttccacactcaggctaactcttctgaatcacatttggacttggagtcatcaatatccatgtttttccatgcgctgtcatcttctttgccattaagatgtcaggtggtagagaatttcataagagtagcatatgagtttcctatacactgcagtcacaaattatcacaacttttgtggcttaaaacaaagcaaaccttgtcttctacttctccgggtcagaggtctgccacaggcctcactgggctgtcaaggggtcacaggattgctttgctttctggagtccacttccttgctgttgccagtttctccagcagcctgtgttccctggctcatggcctctaccgctgctacaaagccagcaacgttgcatctctctgacccaccattcttccacagtcatggcaccctctgagcacagctggaaaggttctctgattttaaggatgcacttgattagcttgggctagcatctggattaaccaaaataacctccccatctcaaagatcttccttgaatcacatcttcacagttctttttgccatgtaaggcaactgatttcttggttctggggattagggcaaagacatccttgggggacactgtcctcctcactacaagcagtttcctatggtctccagaacacccccagcccctgacaccttcctgaaaatgtttatgctggggctctcttgacactgtcagaagctgtcaacaggaaggtgttagacaccttctccaatgatccttagtcatttggtaactaaaatgtcaggagagtggtttcccatcatgacaccaggaattacaacaatatgcctaccctcaccatgccatggctgtggcatggagaacataagacgctacagtggcgtctgcatcctggctttggagtggttaaactaggaacaaacagaactgagagactgtagaatatgatttcatcctcaggaagcccactacagtgagtcaactgagacttactgacacacaacttcaggaggggccattcatgttgagtctatgagaatatgccctcggaggtggccggtagacatggaaataaggaaaccagagctcagggggcagaaaattgcctggaacatgccaacggtctaagcagaatcagaagttgatcccaggtcttgaggctcagagcctctgagccttccatggagtatctccacgctcattaatacaggagggctgatggtaaacagacatttggaaacctctatcattttagccacccacctctctaggtagaacctcgcctagctgggaccttgctgatgtaatatcatagtaatgggccttatttatccaactgatatgctcctgaaagcatgcacggctttctgtaaatgggaatccattttaaatacatgaggaaaaattgttctttaaaggaagtccgaggtgaatccctacttccctctggtcccaaaggtacctaattagtcatttgaagaaggcgacatgggttaggtaaaagaatatttaggcttctgaagctgactgggttcaaatccgggatcgtcatttcctcactgtgatgtcagacgagtcatcaactctctccctccgcgtcgtcctctgtgatgcaggtgcatgtgcctacctgggagtgttggaggataagagtcccaggacatggtgggagctcagcgttcctgtccctcaatttctttttataaggaaaattatcatccctaccatccctgcctcccactgcttgaggagcaaaatgaggcaggatttgtgatattgctctgaaaattgaacagcaccagcaccaggcaaacaggagagattatgatgcagatggctgtgtgttgagtgctcccatcacatgagagtcctatgatgcttcttccctgtgctgcgagggcttcatctcctaagcactaaatgctaaattccccctcccacgcccatcgccactgtcctcacggatcctcgcagcagcttcccaatcggtctccctgtctccagcctcaccacccccaactctcctccacctagaagctagagtggtgttcccaaaaaggaaacatatttacagtcagtctgtctcctgccaaattgtaatttctgatggaaggggctttctgggtgttattcgcccatgtgagcccgcctctagcgtggagcttggcacagggagggttcagcatatgtctgttaagtgcccggttatggatgcagcctgtagggttccactggcctattgcactttctgtgtcctgccaggatgcgggtggcattctggaggcctctccagctggggcagtccatgagctccagaaagttcacatcaaaggggtggccctggctccatgaggaagagtacaggctctgaaatcagacccagggttctgaataccattcccacctctcaccaatcaactatcaattctgtgcctcagtttctcgtctgtaaaatgagaatgataataatgcctgctaatagggtcatttttgtattaaataactgagaatattgcctgaaatccttgccaacccacattattttgaaacaagtctcatttcatccataaatatggcagcatgtgtctccactagataagagctctcacacacacaataccactatcacacctaaagtattaacaataattccataatatcatccaaccagtgttcaaatttctctaattgtctcataaacaattttgtcattttgttcaaatcaggactgaataaggtccatctattgcaagagactgataggggtactgggattcttttgatctatagcaggggttggcagactttcactgaaaagggttagacagcaagtattttggtctttgtgggcccttctgtctttgttgctatgacttaaacgaatggctatggctgtgtttcaataaaactttatttataaaaacaggcagttggccagatttggtcccaagaaggcagattgctaacctgtgatgtacaggcttgttcagattcagggtttttttgttttgttttgtttggcgataacatgtcatagatgggtagcattgcggatttccatccgaaggcttagaatgtcagggtgtttctctttccctctccctctaatattatcagccatgtacattcggtgtccagattcattaactcattaagggaagtaaaatggcaacattctaattctatcgtcccttcatttattagctgcaatacttttacaaagagaaactcgcctttatctactatttgcttatactgacgtatagtttgtacaggaaagttaagataatacatgcttgatccctttcctttctttaccagcttttaaaaataatgagttgggcttcttagcattcttcaaagataatcaatgtacttttaaaaagaacattatgagcaaatagatttcaacataattgaagtgttttgaggcattgcagttactgcctttaatgatgtttaaattgtctccgttttgccccagcttatgacaagacctcagaagtctttgataacatccttgctttctggtgtgatgagatattctagggttatcttattcagtttataaaatcagccttctccaaaaagccctggttctctctggagggaagtgatatttagtaaccctaatatgatactaaggatacttattgtttccagaacttttcagtagatatatcaaaggatcatttttttaaaggcctcagaaatacagaattcagaatactgaaatttctgaatcagttcaggaccacagctggcgcctctatgggtaaggtaagtatgtgggaggtaagatcccccatgatcaaagctgtttgcgtccctcggcccagcccgatcaaacttctggatgccatcaaagagatctgcctaacctaaagatcattgttctttaaaagaaaaacaagttcattaatcatgtgaggaggcttggggccaggatataaagttaatgacaagggactcccttctattaaaaggactatgtgcaaacaggcatgcctggaggaagccaaggaccacgataaaggaaaacaaacaccttatgattcatctaacataggcccggttacaatcgcaggtgtaaaaggaactgggagctggcagtgagagacaacaaacatcagtggaacatgggatggtgactctttctggctgagcgccacacgttcctaccaggaatcttctattagtcatttgggctggagagtgagatccttcctcgctctccaccgtccagggtcatgtttaatggtgatgtttgttctttccaaggagagaaggcccatctaattgcagggcttttgttttcctgaatggactcaggaaggccatggctgaaaacgagggtgctgagaggctgtaaggagaagggaaggagttggaggctctggtggagtgaggaagagcagggcagtatcccatgtcctctgatgttaggggtgaggtcaggagggtgggtctcaccttctcctttctctgccctgcatcggtcaccatggtttaaaaatcaatgctattccatgagagggctgccacttatcatttcagttccaacacctggaaagtaaaattattgtctcccaaatccacccagcaccataggcttgaatagggatcatatgctctaagaccattcatgaaaacagagacaaccaaggagacagtcacccaatgctgtcccttcagcttgcattattttctgacaagacagctctgccatccatggaagcctgtgtgctcctccatccctggatctttatgcatccttttccccacaaacccaaaccatccctcttaaaatgaaaagcttaggaatactcaccctagactgagtcacgcgtttcttgtacaaactttaattagacttgattttttaaaaatttcccttgtggcttttaattattagacagagcaaatgtctctagtattaaacttatatgtcacatagcctctttatcaatggccctaatacatttcatgtgcttttcagaaagattatattcttcccagagctgtctgaatgtctttttgaacccctcaagactggacaccaaggagtataaataatcattttaaaaaaaatcacattccctccacaaccttgaatctgaaacgtgaatatatgaatagaagggctctggaataactatgcagatttatggagaatatcaacttaagttatatcacgggatccagctatgcctttcttcatggagttggggatttgttaaagttgagatatagtttgggggaagtgtgatttatggttaaagtcatctgaaaatcaatacatttgaagatctctgacataaaggtcccttgcagagctagacgtgattctaaaattgggaacacaggaataaaaatcaaatcttgagtagaagtagctgaaaattgcagtgattcggggaagcttggcttctaactccccactgtttgaagatgggcttgtttgttttttaaaacagccaacataattcagctggaggaggtacaaagaattttctattccttgtttctgtagaaatcgatggactttagcttgtctaattgtcccccctgcctttagtatctaaaataaaataaccctcgttgcttgcattactcaacgcatttctgcgtcttggcgtctatggctaaacgagtattaattagacagtccgcagagagctggctggggatagaaggggaggtgggggagaagggcagggatcacagcagggtggactcgtggccctgatttgggatcctgacagcaacttactaggtggcctgagggctgggtgccaggggaggcagcgggttccagtagcatctgacctgcattagggacaggggcgcggcggagggggcgaagggggcgggggtggggggaaggtggctggggtgaagcccagcttcgcagctagctgtgggcaacagagggagtaagggggggcaatgaggctggggccaggcgccagcagcagccacgccccccacctcccccgatttttagggaaaattctccaaagctctcgcatcctcctctgcctccttccaccctccaccctcccagcctccactgagacctctttaaaaccacccaggggccgccgggggatgaggccggggaacgggctggactgagggcgggggctcgggggcagcggacgggaaacgcctcgaaagcagccagacccggcgactgaaatgaggcggaggagcttggcgaggggaggcgcaggctcggaaaggcgcgcgaggctccaggctccttcccgatccaccgctctcctcgctgacctccgagtcacccccggaagctcccgccactgccgggcgaatagacccccgcggacccccaagcgcgcggggccggggccctagttcaggccctcgctgcccctttaagggttctcgaaactttccccccggtatcagatgagcctcgtcacatccgttggccgtggccgctggggcgctttccgaggaaattcgggactcgagtttcccggggaagaggcgcggcctgagcccggcgagggtggggagggcaggcgcaggtggaccccggcgccccccgagccccgctgtgaccttggccgcgggggaggggctgggccgctgcggggcagtcgcggccgccagagggggcagcggagaagaacttgcccaacttggcggcgcgggctggggcggctctgcgcctccgcgcccgcctccccggcctccgccttctcccctcccgcgagcctcctcccctcccgcgagcctcctcccctgggccctcctcccgtcctccccgccgccgccggtcccggtgcgcgcccatccctgcccgcagccccgcgcgccggccgagtcgctgagccgcggctgccggacgggacgggaccggctaggctgggcgcgccccccgggccccgccgtgggcatgggcgcactggcccgggcgctgctgctgcctctgctggcccagtggctcctgcgcgccgccccggagctggcccccgcgcccttcacgctgcccctccgggtggccgcggccacgaaccgcgtagttgcgcccaccccgggacccgggacccctgccgagcgccacgccgacggcttggcgctcgccctggagcctgccctggcgtcccccgcgggcgccgccaacttcttggccatggtagacaacctgcagggggactctggccgcggctactacctggagatgctgatcgggacccccccgcagaaggtagggacccccggctgctgccgcgggcttttcgggctcgttggagggagggggctgtccagagacgcctccacgcggcttagcgtcgcccccaaagcagcagctgtccccgcacagaagagcggggaacgcagaggggctcgggtgggccggggagcgggggcgctcgctcttgagtcgcggaggacggcagcccccgcccggggcgcactgaggggtgtgcgcgagtgtttcagaacttgtgagctccccctccgcggggctgggcgggagaggagacctggaacttgccgcctccaataacgtgatttccttcttgcgggcgacacctacttccagcgggagacggagcggtgggccttgggcgacgggctattatggggaaaatcacctcgtgttcataccctccctcccccccgccccccccccaccccaccaccatgctgtctcattgctaaagaggctcgtggccggcttccaaaggcgcagtaccctttaaaaaggatttatgcatgagctcagctaaaagcaacccggttaagaagtggctcgcttgctgctctgaggaaggagcagcgtctcccctgcgcccgctttcctttctcggagttggtttgtcagctgtgtcctcgctcatccggcggccctgcccctctgcacggagcgatgcatctacacgcgggtgtgcagagtgtgaaaagcattccagctaccgggaaaaaaacaggggctgagtgaggtgtccggggaccaagtggtatcccgattacaacacaaaaataaaatcaaacagctttccttttctcttactctgatgttcatttactaacactttttgtagcaagaaacaaatgttcccaagcacagtgatctgaaaaaaaaaaaaaaaaaatcccaattgatctgccccctcctactttcaaactgtctaatccaagtgggatttgaagtcctttgctcaattgaatgcactatttgaagatagtttatttttatttttaacattgtcatttgggttttgattcagctatgattcccccataaatagaacatactcatgacttttgtataattctcattaaattattcaagactttaagaggaaagacatgccatgctaattcttttaaaaaaggaaactgccgaataacttctgtagttgtttaattagtttagggggaaaaaaaaaccttcaaaagcgtatattcaaactttgattctagttgcctttcgtctaagtcatgggaagccacgtgagtgatctttgccatctccaggagtggatggttagagggagggaataggaatccccatcagctgagggagcttaacttggctgtaagatgtggtcttggtgcagccaacacgtgggaacatgtgcctggtgctgagaaccttggaaatatgacaagatattgaggaagaacctcttctgtgacctgcagagaatcttttggaacaggccttgaatgaatccccattggacatgtgtgctttgatgcgagggaattctctctactaaaagtaaatgtgggtggtctgagggctatgataaaagaagccctgaaaccctccctccagagcaaaggggaaagggagaagcctgaagaaggactaaaaaatacttaactttggcaatcaaaaaaaaaaagcttttataaataataacttgcctgttaattaattcaatgacctttattttaaaatgatgaggtttaattaatttaattaacagaaatgtattgagtacctaggctcctgtctttaccgtagccaaggcagtagttggttcaagattacttctcaaccattagcatgtttccagggagcgctgcttctacagagacagatttaatttttacatgtgatggggaatgaaatatcctgtacctccctcctggcttgatttagcgataagctgctttataaccaaatctttccaaatgcctactgtaaagtcaggctttcctgactactgcattaggattcactacctgcctgtgttgccctgaaatgtctctgaccaccagcagggtgtcagcagccggctagagggggcagcagtgaggtgacttctgaacctggagtgagctttcctgctctattaatggccaggagtcatgcatttattctctgctgattctctgaagcctaaaataaaaattgcttaggtggagagaaaaatggaattgtaaattcaagcaataaataaccaagaatttttcaagaattaagtaatagtcatagacaatgtctgaaagctcagtacgtgacaagcactgcgctctgtgctttaggtgtgctttcccaggaatccccacccaccacccaccacccctcgggggtcttatacgcatttgggggtgggaaaactgaagctcggagagactgaatgactttccagggcaacagggcaagaaagagggagggccaaaaatggaagccagggagctgaacttcagaagccaagttctgaaccaccagacagataacgacttccttcccttcatgcctcctgatctctttggttttggcctcaaactaccctttctagccagagaaccctgaacgtacaccccaaggtgttagggacttattgtatgactgcaactggaccctccggaactccgtgctgttcccccatctcctctttccttcagcactgctgaatgagcaacagaatgaagggctggatccaggtgtgcacgggagaggccttgagaggagaggttcaacaggaaccagagccctccagctccccttcttttatgggaaagtcaactgttggaagtgtgcttgttccccgaaggctttaatcaggaactagaggtccattgtttaaagcccagtgactctgtgaggagtcacaggcatgtgcccggaagcccgcctgagagctgcaaggcgtgtgtgctggcaggcagggccacgttggcatggagatgactgccaggtttgcggctgatcccattatgtgggttctttcgaactgtagaacttttgaacagttctttcaaccagcacctgcttgaaccgtgcaatttggtcttattaataataacactcttctaaagtaattataattacagcaatttctattatgaaaaaagagactttcatgttaacacaataactccagctgaagacaggagaaggtgtgcagccatataccttgtagtagcttcaaaaaaagcctttgggattctttttctgaaagattttctgtcatctccactaacataggtaaagcagacagcaaaactattctcatacctgaacacttgaatgtaaagggccacctaattattttggcgaatcctattttaatcatggtgcattcacttgattatcagcctcttagtacacaattatttggaagacttgtattgaaaatatggatccagcatatgcaataagagtttgtgttcttcagaagaagccatccaggctccccaaatgaagctgactgtaggtgaggctgaaaacaagaaggcaatcccagcaagaagaaatctgatggagccacttgaaatggtaaactattaaagacaatgagaaaaaacaattactgaggttgaaagaacaagaaagtcaaagccagtttgccaccagctccttcgagtgagaagtggcagcttctgggctttagagaaagaattcatcaaagactgtattacagaggactgggaaaggtgagccaagaaatcagcttgaaacaacaaggagggacaggagtctgagaaatagtttataagatcaagagctgaccttgatttcttgctgatggagtgttggacactcaaagggcacgtgaagccctgtgcgtggctcacctcattgtatccttgcaacgtcctggaaaatgtgcacaacaatgtgacttaattttcagacagggtaaccgaggcttggagaggcagagtagtttgtccagggccacactagtgaaggcaaagcagggtggagctgtcaatctgggtcagcccagctcagtctttgcacgtcactgccgttcctccttaggtgcagtgttttagttacagtaactttttaagaagaaccatcttcatgcttctggagatgatgtggtttgacaggaagcatcctgatgtgattacaggtcctgagcactgtagtgtcacacctgtgaccaggagcaagtgtgtaacctccctcatcttccctttcctcagctgtggagaatcaaatttctgcattaatgtcctggtctcaaaacaatagaaacttgttctcataattctgcaggccagagttcaaaaagcaaggcgacagcagaaacactgtccctccggaggctctgggggaggatccttccttccctcttcttagtgtctgatggctgctggcatttcttgacccttggccgcatgactccaatctctcccctccatgtaagtttctgtggccaaattcctctcttcttataaggagaccagtcattagattagggcctgccctcctctaacctgacctcatctttacttcatcacatctgcatagacccactttctgaataaggttaagttcacaggtaccggagttacgtcttcagcatatcttttggggaacatgatttaatccacaacaagttcattctaagtttttcattctatggattttttttctttgattctacctcaccttttaattgttaataatttcaatttgggattcaagtgtaattgttatcacaggcaatacacaaatgacgattttagtgctgtattgatatgaagcctgcggcaagagagtgccctggggcttagggtgggagaaggaagagaggagtgtttctgcttcccttctgtacttctgtattgtttttcctgctggagagtaactgcttgaaaatttaaaatgtcaggcggggcgcggtggctcatgcctgtaatcccagcactttgggaggctgaggcgggcgggtcacctgaggtcaggagtttgacctgacccagcctggtcaacatggtgaaaccccatctctactaaaaatatgaaaattagccaggcatggtggcttatgtctgtagtcccagctactcaggaggctgaggcaggagaattgcttgaacctgggaggcaaaggttgcagtgagccgagatcgtgtcactgcactccagcctgggcaacagaacgagactctgtctcgaaaaaaagaatttaaaatgtcccatgtcatgttgcactaattctagaattgctgaaattaatgtataatatgagagaaatccaatgtgtacaagattagatcaatgatatttaaatacctatgagtaataaacacttatgttgggatggatgtagaaagcttcagtatttcatgttttaaagacattataaggcaacccccttatcaatcaggatatatttaatatgaaacaggtgcttccccccatacttcccgccatactcatccctgatctccttgtgtgatctccttgttgtaggtaagttggcttcacctccccttgcctgcccatttttcctttttcctcctggaatgatcccaaaatgataaggatagctgttgtgatcagtggcctttttttttttttttttttttttttaaacagtctcgctctgttgccaggctggagtacagtggcctgatcttggctcactgcaacctccacctcccaggttcaagcgattcttctgcctcagcctcctgagtagctgcgactacaggtgtgtgccacgacaaccagctaatttttgtgcttttagtagagacggggtttcaccatgttgtccaggatggtcttgatctcttgacctagtgatctgcccacctcggcctcccaaagtgctaggattacaggcgtgagccaccgcgcggccaagtggctattcttttgtggtggtggtacgtagctgcattgctcccaggggtggagagggaggaatttaaaggtggtgtttctctccttctccctagtatctgacagcatgccttgggatttatgtaacatctcattcatagactagagcaggtcaagcattggcccctgaattcagggtctacctgtgctggagaagaggtggggggttagtgggcactgactcttgccccaaccccacactgggtacagcaggaacggggtggtggtcctccttgctggtgagtgaggtccctctccaggtgacctgaggctcctatgactgactgtgagcctctgcctgtccttgagtcccttgctgtgtgtcatggatccctcctctgggtcaccctgtttgcccagccttggtgagacactggggttcattgtatgttaaggtaacagatactacccggacaatagggcatacctgtgaggcaggtgggcagcctggcaccccttctgtaatttccctgggtataaacatgtttctggtggaacctgaggaagagagtgtcacctcttctgggtgactttcctggcctggctccccttcatcctctcttggcctagatgtactaatttgatatttgactattgctactcaatacaaaaaaaagtggtcacttttttgctcttagaattctcaaaagaagagagaatactctgggagtgctgacattaaccacataaaggaaatgaaatgagtgtgtttgttttgtgctaatgcttgctgtccagcccaggccccgggtgggatgttttcagatttttattatatggcaatcatatacctgcacctagaaatatacaacctcggcgctgccattgcaggaagacaaagagactgtctagagagtaacgtggcgatgccctgggcagctccatcattccagggtaccataaagggaagtgggaatgcacactccatctgtttcacgctaggctgaaagtggcagggggagaatttacacctggcctgcaaaaggcagccttgtgttcccacttcagagccccaacttctccaaagccagtgcttgggaaatggccttgttggcagcaggcaggagactggtgcagtgtgccagctgtgcaaacccccaccagactggtgcagtgtgccagctgtgcaaacccccaccagcagcacccccaccagcagccaaagaaaacaatttctaaagcagcccccaggatttcatgccacgggggtggtgaggggtaggaggaggtggaaagcattgaatcagaaagtcttccaggtaccagcaatgccagggttaatatggtctggcttgcttttcaggtgagcacctgtagctggcaggaaagtggcttcttggtggaggtgggcatgaattccagaagccttggagagacatccagagcccttcccactacatcgtgctgcctcctggggaaattcctaagctttttttgaatcagaaaagccactgacaagcagacagaattgtgtggcttgcgcagtgattggagagctaggtgctttgggtactagtcccagagctgctacttgtcgaatgttgggtattggagagaagtcatttgagctgtctgagcctctgtttcctcatctgtaaatcagggaatttgaacaagtgacctcagattccttctagaagctctaacagtcaatgatatcatctatttcatttgagagaatctccatagctctaattttttgcccccagaccaatctgcttcagctttgtgtgggtgcaacacctggggtcctgttaaaatgcagaatcggattcagtgaccgagagcagagctgagggtggctgctgccagctcacaggtcacacttggagtcgttgcttctttccccaaaccagctgccgatggttcctggaaagagcaggaataccttgcagaagggcctagaaatagagattcccatatgcagtccagacttattgggtgagcctgtctgcactaggacctgagaatctgcattttattatatcccttgagtcccctttaagcagccacgctggccccagccattggactctatttggaggccactgcagaggccagatgcccctctgctcggcggtttcctgtgcagaaaggctgtgttctttcttcttcctaaatactcttcctaggttaagtgtttccttctctttgcccatctagaaaatctccacctcaagcaggtcgtgttccaaaaactcctcgtgttgggcaagtggaaaacacgcagttttttctaggggtctcattctgaggcggtgctgctgaaaatcttggtgctgaacgtgtgtttttgagatttccagtctatcacagggccacaaggtgtaaatatcaagaaaaatgaattactagaaaggcaaagtgaaaaagacatacaaaatacaagtgtcattctttttattcttagtttggacagatagtccattcttctacactggtcccacggtttctgaagcttcctgtaatgatcagtggttaccttgttgcccaagtaactgcaaatccctcctctacaaagtgtgcttgctccaaggcagtgcaaactagaagttgttacaaatggttccagtaacaaatttgtttggcggccttttcccatgaatgagacagtggttatttttgctaaagcagaaaggaaatgtgatactattgggctgtgttttgccctctggagtaatcctgcttggggaaaatggaggcttgttccagaatgcagaaatccctgttaaattaggcagtcttgggctggaggacgtgtgcctgcctccccagtgcctcacaactcacatctctaaaggccactcaggtgggacaccatcaagacattgaaaatcgacagaaggaaggcaggaaggggagaggatcgaacctgtcaaaatagatattcagaaaatctgtgctctaaaataaggcagcccttccctcacagcacacttattcctaatttcaacaggactcctagtcttgccccacagcgtcacagcctacagcaaattagaaactggggtggggggcggatattattccaccagtaatacccttgggacggggcacacaagatgtttgccctcctacctctctgtcaccttcccaagaaagggtcaagatgaaacagtgtgcgtttatggtattgcgagagttaagtgagctgcggtgtattagaaccttagcctcgcgcagcgtcagccgtgtggtaagtgttccataaatcttcgtttagaaaaagtggcaaattccaggctgctagtaaacaaaggagggaagacagacaaaacggaacagcaacaacagaaaacccaagaactagatgcccaacaatctgggtctgtatcttgaaggaatgtgcatcctgtcctctgactgcaaacccaggccttctgtggccccacgatgctgcctcctagccctcctaaggtgggaatggagctttaccccttggtggcaaacagacctggctccatggatctcaacctggggtgattgtgtccccaccccaggggacatctggcatcctctggggacattttgagttctcacaacttagagggtgctactggcgtcctgtgggtggagactggaagtgctgctcggcattctttgccgtacagggcagcccccacaacaaagaacgatctggtccaaaatggcaaccatgccaagattgagaaatcctggttactcgacacagcaggtcggctggcctaggagttgctgcccagagaggcaaagggagaatgtccagtggaaacagctgccctgagcatacagggcacgctgacacctgctgattcccccatccttaaggtcctgtattgttcctaacaccacgtggatcttcttgccagatgcattaaagtgtgagaagagttaaaaatcacttataactggagtgactgggggttaaagaggagaaaaaatttgaacctgactcaaaggatgagcatgtttttctttctttcttcggcacattggctgggtgtggcggctccatgcctattatcccagcactttggaaggccgaggtgggaggattgcttgaggttaggagttcaagatcagcctaggcaacatagcaagtccctatctatataattttttttttaaattagccaagcttggtggtgcatgcctgtagtcccagctactcaggaggctgaggcaggaggatcacttgagctcaggagttcaaggctgcaatgaattacgattgtgccactgcactccagcatgtgcaacagagcaagaccttgcctcaaaacatattaagcacctactgcatgtcagggccttggtctaagccctggtatgcaacagtcaactagacagagagagtcttggcttttacagaacctccccttataaggaagacagattgtcaaggaagtaaacagacttttagaggagtgctgtgagacagtgccatgtgggaaggggtattggtgaaagaatcctgctttataagggcggttatggaagacctctctgaggaggtgcaatttgagatgagattggcttgaggaggactgagccttcagaagttagggaaagcgtgtcccaggctgcagccagggaggtgaagacttgagggtgtcagggtgaggagtgagggtgtcagggtgactgagggtgccagggtgaggagtgagggtgtcagggtgaggagtgagggtgtccagggtgaggagtgagggtgtcagggtgaggagtgagggtgtccaggttgagtgagggtgtccaggatgaggagtgagggtgtccagggtgaggagtgagggagtccagggtgaggagtgagggagtccagggtgaggattgagggtgtcagggtgagtgagagtgtccagggtgaggagtgagggtatccagggtgagtgagggtgtccagggtgaggagtgagggtatccagggtgagtgagggtgtccagggtgagtgagggtgtcagggtgagtgaacgtgtccagggtgagtgagggtgtccagggtgcagagtgaggtgtccagggtgaggagtgacggtgtctggggtgagtgagggtgtccagggtgaggagtgagggtgtcagggtgagtgagggtgtccagggtgagtgcacatgtgtggtgaggaggtgtttgcagtgcttcaggcgcagcaactctttcatctagtttaaaattgtgctctgaggttagattttagtagaacaaaggccttacaaagaatgtgaaaacattgtgcttccctgcttacaggcaattaaaaaggagaatcaagctgagggtgcctggtgtggggtggggtggagaagaccacagagactattgtgtgttttattcaacagtgtcctgggctgctttctccagaaatgtccctgacacatggatgtaagtgtggctagtttactgggagatgatcccagtgatgcaggacaggcgagccctaagattgaagcatagcccgggagggttcttagctttgcccaggaaggaactcaagggcaagccagtggtgttagcaacttttattgaagcggccggctgtgcacagcagcagcagaggcgctgctccttgcaaagcagggctgccctacaggctgtgcgcccacagtagcagctcagaggcagttctgcagtggtatttgtatccacttttaattatatgcaaatgaaggggcagtttatgcagacatttccagggtgagggtggtaacttctgggtgctgccagagccatggtgaactgacttgacacaggtcggtgtgtcctatggaaactagcatctgccctggacctattttagctagtgctcagtttggtctgagtgcctgagccccacttccagagttgagtcccacctcctacctcattcccccttcagagattagatactcctccttaatcttaagggggctgcagaagggcggagatctgttttccgtaactacttcctgctgagtttatggacgtaggccctgcctggcactggaggagtaaaaatctctggatacctgatctaaggagcccagaggcaggacgatttcattctccgtgtcagtggacaggatgggctggaagccttgtgccagcattgtctctggaactgtggtaatctagaatacacaaactttactaagaggttaaagaagcaaggaccaaacatttgtaacaagacagttgtcaaaggtcctagaagaggtgaaaaacaggtgagacttgggaaggcacttttgatggttgaccagatatagttgggggcagtgccctggttatatctatgtaactaggtagcttgctcatagatcttttgaatgttaacctcaacctgtccagagttaatatatgtgcagcaggttttattaataactgcacaagaccccaccttgttcagctagtaaataatccaatgctagtctgttatcaacaactacattttccagagtctggggaactcttgaattctctttaatgcctgatctccgttggtggctaaggattctaggatttgagccaagttctttagcgttaactcatggtaggcaaagccaccccagggtgctgctagtcctattgccaccctgattcctgccagaattagttttattgcttacttatttctgatattcttgggtcctaggcgttatagattgtgacccctggaggggtaagagtggccaacgttcattcatgtcagttccaagttttttagatacaagggaaagctattccttaaagaagaggtgactccttagggagttggagtggttacagggtgtgacttcttcccattcatagtcacaaacaaaaatgaacccaactagggcaccaagagaagccctgcggggtgcgatgtttatacttcattgccaggttgggtctatagagatattttccacctgttctcatggtggtggttgaacaatctttgttttctagaagaaggtagtactgtcaccttcccagatcaggcagttgtttttcctttgtatgttcccatccgggagaaggtaccatatatggtcttttcactcacaaatggaatctcatttacctccccgtggtcttggaaacttggcaactagagttggaccagagcatcgcagggaagcttccacttttgtgtcattaatgcaagagtggatgcaaatgttagagttatgagtgcactggagatatagatgcccaacttcccagattccgataatagtggtcagggcagggggacagcagggtccaggggggatccactaagtggggaagagttccacttcacaataggggtttgggtattttggggtgctatggttagttaggaggtctggggacatggtcctgagattttccagataggtcggaagatgaaactgtctatcctgggggtgttgatgacaaatctggcagccataaagatgattctatgatgctataatttttgaaatatttactgtagaattttgtccaccctccctgtccacatacacactagcttaggttaattagaagagcaaacagaattaacagtggcatcatggtatctggttgggtcttagagtagcttctatacccaacaagcccacaggagatgtttcccaggaggaggtggctggttaaagccatagaaaggaagtactacagtcaggaagaagagcaagatcaatgctcctattcccatctacagcattacattacctcttctggctgagtgttgattattttaaataggtagcagaggtcttccaaagctttactgatattggttgtggttgtagtgcccttcctttgtgcctgtgactcataagaaacaggtttagtcctggatctgtgtgcccaagtaggtgttccctgaagtttaacagcagtgggggtacttaacaatacctgataaggccccttccatttcattgtaattgattcttggggtatccctgtctttaccctgtctttaaggttttagcaagactaagtctcctggttgaaccggggagctattttttcctttgtggggaaggacagtattttatttttatattggagggccttttgaacctgtcctaaattctaaaggggaggggggaaggttcatataggtaattactacaagccaagaccacagcagctcaacacataaaatccatagacaaatcagttttacaaccccatttcctggcttctagttcttggcttccatactgctcaaaaggagttcaagggccaatgagtgcccgcccacctccacactcatgcactgtgcagatgacttacacagaccatctacaacatagctgaatttcctgacatgttctatactacctctttcttaaagttattttactctaggatagggaatttactatacaggattcctccacatataaaattactctttctttatatccttccttgcaaaacaaacaaaaaatacattttctattcataatattctttacatctctcttttctactcactggttcactcatgttttgaacctcccatttagtaacttccggattagacaaaaaattttttctcaataaagaatacatttctttagcacattttatggaaacctaggaaggaagaagtcatgaacttcacactagacattgtcattctataactgagaaccattctaccattttatgattttaaaccacacattaagcatatcccatttacgtgtatttaattatttcacttttaactttatctagatcaccgagaaccaaggtaccatgcaaagctggtcaccatttaaagccattttaaccattttaaagcctatgaacatcagtgacttacctaggtaaaaatcctaaagttaaattttagaagatacaagattctcttcaaactaataagctttcagtagtcttatttgttgaatgtatgagtgttcttttatctataagccagtttgacagcacgctagatgtaacacacatcacaatacatgtacatatacccaaaaacatattaaataaaatgacctatacaagacaactggattcaagttatttacagaactgggacccatctacctggccaaattttgtttgccccgataggtatggaaaacaggaaaaggcaggacagggaatcccatagcatcaactaaaaaggggaggaagcaaactgcattgctcaaaaggagattctggagtccccacgccactggagagcacactcagtggtggaaataccaaagaaaaatgttcaggcggctgcttatctgccactgtggaaagctgtcctctgggacagtaaacttacttgagctaagcagctcactggggctagtaggagaaggttagctctagtattgatggaagctttttgttgttattgttctctctcaccagagcagttaggacatttgcattgccaggggcccttttgcgtatagtaggcgcagtgattctggcccaggggtcagcaagtcaggcatcaagtcttgtctaggcatcccagatgctaattttgtaacattttctcaagatgagtaatcctgaggggcaaggaggcttaaagtcactgttaacaattgtactttttggctatttctttttactcccctcttttgccctgtccctgttgttgtaaactttaaaggctatgtttaagcgtcgtttcataggacttgaaggtcccattgctgctttttgtagattcctcctaatgtcaggagaagattgaatgagaaaatgtatacccaggagagcttgcccttctggggtgtctgggcctgcattagtatatttcctgagtgcttcaactaaaagaccctgaaacagagcgggattttcatcttttccccgagttacttctttaaccttgtcataattgactggcttaaccacacactttttcctctacttttttttccccacagcacagcaagcggatgacaatatttgtaaatcgtggcaatttgaagaacatagtcaacgtaacaaactcttgtataagcttttctggtttatctgaaaactggccaattctttccttttataaggtctaattagacatggaaagtggcatatgtactctttgagtgttccctcatttccatcaactactttccacagtggacacaggcttgaccttaggggctgatatggagccccactcctggtgtactggttgggctcattttcttgggcagcagagggtataggctagggctagttggataagggggaaaggtgcctgatgatattggggtggaatctcattagggaattggcgagaacccccactcaggactgggggactgaagagactctggggaggcttatgaactttctatggggagcagctaggtggggatcccttatgcatggcattctaatgcctggaagtaacgtgatccagtatagagccataaaagcctgtacataagggatctcttcccattttccttctcttttacaaaataagcctaatcgtaaaatatcactatagtatatagaaccatgtttaggccagatatattcgtcatctaacttgtatttaacccaaatggtgttgcaatacaaaatgagtttctttttctttaagccaaatttgaatttgctccaatagcttaaaagacaccctagcggcgagtcccttgggatactccttgttgtccccatgcctatattaaggatctctctacagagggttttattagcccaagtttagcaaaagcctagttactcttccctcttaaattcccgtgttctttaaaggtgtaaatatagatagcaaggtgttataaaaatggattatgagctacgaatgggcagtcgaatgtggagcctaaattccatagagatctagagttgggtggagagggggctaaacaaatggaggaagggaaaggggtaaacagcgttgcccaaggggagacctcagaggctctgacttgctgaagaacctacccagtagtggagatactgaaaaaaatattgggctggccacttgtctaccactgtaggtggctgactgccaggccaggagcctgggagctcccaattcctttgaccaagagcagcttaggcaagggagttataagacagtacacaggaaggagcttgcaattggctattaggaaaataatactcctaacttcagggtggaaaaagacaagaccaatattcgcctagcgaaaggggtataacccacaatcctagaggaaatgtcagtgctaaaaaccccagagcatctggagggtggcctataataccgatgctgagaacccaaaatgcctgcgtttcagccaacaaggatgccctcgccaaagcagctgtgcacagcagtgccaaaaaccctggggtacccagtgggcggccaaccccgtgaacccaagaccaggttacagaacatagaacaacgtgacaacgtgactctggtatcccagagtcaacacaacaggggacctctcacaaccaagtgtcctgccttaaacaattgcccaaatacaattaacagaaagtcgaaagcaaacataagactccaaacaagacatacatgttaggactgaaaatgaaaccaaagtggagcaataaaatggagtcagaggagaaagaaccaggtgaaggggtggcaagaatgtgcttcaaggcacctaaaccgtggggaactgaccgcttagccaaaggcttttatttcctagcttacctgatattactgggggagggtgcaaaggggactctcacccatccacagaagacaaaatggcaccagccagtcttccacgtgggacccgggtgcaggtctctctaggttccccagcttgggggtgctcagcttctgtgtcgggggctggctcgttagagcagtgggtcccacacgaggcagctgtactatggacacttggctgtccactcagtttcaccacctgccagggaaagatgatggctgtgaaaagaggcactggttagggttagagctcggtagtgttagcagctctttattggtacttcctcagtgttacagatcttacatcctcaatcacagactgcttcaccgtctcttgctgtcttgccaactgctgtctcttgtctctcaccaattgctgcctctctgtctctgctgtcttgcctctctgccaattgccaccatctccgctgtccttgtccctttgctggttgccagatgatgcaggacaggcaagccccaagactggggcttagcctgggagagttcttggatttgcccaaagattcaagggtgagctggtggtgttaggcagcagctttcatggaagcagctgtgcacagcagcgccagagatgccgctccttgcagatcagggctgctccataggctgtgtgccctgagtagcagctcagaggcagttctgcagtcatatttatacctacctttaactatatgcaaattaatgggcggtgtatgcagatacttctaggatgagggtggtaaccttagggccattgggtcattgccatggaaaggggtggtaacttctgggtgttgccatggaaacggtaaaccgacatggcatgctggtgggtgtgtcctatggaaaactgcatctgccctgacctgttttagctagtgctcagtttggtcctatgtccaagccttgcctctggaatcaagtcccgcctcctgcctcaccaggagtcgcaggtaagagtgtgtgtcatggaggaggttataaatgtgggccactgagacccactccccactggggaactctgagaggtgacatcagatagattcagctgtgctgactagggggcaaggcagctgggccttatcactccctcctgccaaccgtgggtggagggcagctcacagggggttcactcttcagcgtttctggctcaatagctggccaaagaagccatctgcagagagtcacaggtgcttgcattagaggctgtagagtcaagtgcccaggaagggtgtggctggcagtttgctgtggctactgtgtgcctagaacaaccactgtgtgctagaaccatggctggcacaagttaggatgatatttgaggaatgaaagatcgaatatgttctaccactgcacgtatttgagagcattattttggcccaggaatcacaaaacagagttttaaaactgttctttaaaatcctaacctgctagcaggctctagactctaactcatgaaagcctctgtgagtttggagtgtgcctgtcattgctgtgtagttccttgaacttttattggaaggtgaagatgtgatgtgtagatactgagcaagagaaaatggttggggggcaaagggtgatcgtgtttgaggttataaacaaccacaaaaccgcctttgagagttgagtgctctgaacgttaagagcttgcaaaccctttagaatggctgggctttgtatggttgactggcagcacaacaaagttgcaagcaagtgttaaattcctgacccactaccacttccatgtaatccatcaggaagtttaccaaagtatagctcccacagcttttgtatatataagaatttactacgtagtagttcctttatattctgtataacgtcagttcttaagtacacacacattttaaaagtacgtaatattgttatcatccttccattagtcaatatacgtacattttggtttaaccctgtagtccaggggcaacttctatgatccctccttcttgctttttgcacccaaataggagagaaggcagtgtcattcagaatggtcgggctgcaggcacctgtgggccgtgtttatagagagtggaatcactctgtgcccagcagaacccacgtcttcccctccatgtcagagctggtgcttcacttggggcctgctcatctctgtatccatggacatatgcctcattgcctgggtttatgaatcatgaggctaagtagagaattgaaaacaactcccaatatttgtgttcaggcctagggagaggcagggtgttccatggttggcaggcctatgcaaaccaccccagagtccaaggaagctgagaggccgaagaagaggctgccaaatccagtttctcagaaagaaatatttaatagggacttatgaatggaagtcatgcctgtgtctagagtggtggcaagacgagatggtggattcctacccatcacccccccagacccagggcttacataccatagggaaggaatgtctagggcagtcgaaaaggcaagaatcctatgtgaatctgcctaagggcaggattgcctgagctaagggcaggatttaccaataagtactttctcttacataaggaacaatagataagagaaaccttagaagccttccaggaactggggtcaatcagaagtcaacatggtggtgggaatccaaggatggagttgctttagcctctccacagggtcctgctcaacttcaaccttaagcctcatgttccaagccagtgtcaacaggattcttcctggggccactgggttttagcacagccaatggcacattggttaccgtggttccttagccctgtaattgcatcagaggcctgcccagaagactgattggaggccagcagtctcgctcctgtggccaggcagcatcttcttgtgtccctcgagagttttgaaggtattttcacattatcttcccgatgctgttgataagtctgatgcaattgtaattcctgattcactgtatatgaactgttttctttccctccagaaacatgtgaagtattcttgacctggtatttggaaatttcttgttgatgtgtcttagtctggatctttaaaaaaaaaaaaaatgctgggcacttggtgaatcttttcagtctagaaactcataacgttcatgtctgagaaattgtctagtaattgcctgttctctcttcttggacctcccattattcagaagttgcaccttctagtctggtctctctgcttcccttgtctgtctttttggttcttctctccattttcatttctgccacccacattttagttttcaggatcactttctttttctctgaatgcttctgtttttgtttgtttttcaccttattcctgtttcaaagttgcacatcttcttatatttctctgagaaaattatgattttgcttaacacttgatttctgcttcctgctttttatctgtctcctccaagttccttgtttcagtgtgtttgtcatggtctttgtgtctcatgctagaggctttcctcactatctcatgattattggctgtctgttcatatttaaaagagaagcattcaaatttgattggaagttaaggactgtatggagacaaggtatagaaaatattttcattgttttattagtcagggttctgtaggggaacagaataggagatagatatagataatagagatagagacatagacatatagataaaggggagtttattaagtattaacttacacaatcacaagatcccacagtaggctgtctgcaagtttgaggggcaaggagagccagtctgagtctcaaaactgaagaatttggagtccagtgttcaagggcaggaagcgtccagtacgggagaaagatgtaggctgggaagctaggccagtctctccttttcacatttttcttctgctttatattcactggcagctgattagatggtgccctccagattaagggtgggtctgccttccccagcccactgcctcaaacgttaatctcttttgacaacaccctcacagacacacccaggatcaatactttgtatccttcaatccaatcaagttgacactcagtatgaaccatcacaagtccacccctcgtcaacttgaacccatacacatctgagatcatacataatcttcaaataaagacaataataaggtcataattatgcctaacatattacaactattctttgtacaacctgaaacacaccagtctccaacccaaatactattacataaagttaacaatacttaaatgctgatttgaagtcagtaaatcttatgtcacatgctaaaggaaaaaggaaataaaatcaagatattttcttagtacaagtataaacatgcacaaacatgtttttaacaaaacaaggaaaaaatactcatgacaattacagtcctcgtttctgcagctggtcacgtggttgtagccggtattgatgactgccttcttctactacccattctgtattccctttgccttcagcaaacaccttggcaggttgtgatttttttttcctggtggagtgacccaaaccttcattcctgaagggtctgggccatttctagtcctgcctggattgggctgttgtagtttcccattgatcttaatcacagggcatggtaatactaagagatgccctaatggatctcctgtattccatgagtactcttccttacctccattgtggagtagtagactgatttcatcttgatagtctgggtcaatcaccccggccaactgtaactcccatcttagcctgttgacttaaaggtaggaggagcccaaagtgtccaggtggcaatctgaacttacagtttaatgggattgttgttgtgtctcctggtggcagtgttcctccctctggaactaagacctctagaccaacagaacttaatgtcatgggaacaggcagcaaaaattttgctacttaatcactaggggtgatggtgagtgatgccacttccacttccaacccttgattcctggacccgtgaatcctggctatgggagaaacagtaccatatatgggacgctgattcagagcatacacggccttctggagaactttgtcccaggcatgcaaagtattgtcacctagttggcattgtaattgtgactttaaaaggccattccaacattctgtcaatccagctgcttcaggatgatggggagaacatggtgagaccagtgcattccatgagaatgagcccactgtcacacttctttagccataaagtgagtgtcttggtcagaggcaatgctgtgtggaataccatgacggtggataatgtattccgtgaacccacggatggtagtcttggcagaagcattgtgtgcaggataggcaaacccatatccagagtaagtgtctattccagtgggaacaaacctctgccctttccatgatggaagagttccaatataatcaacctgctaccaggtagctggctgatcacccctagaaatggtgccatattgaggactcggtgttggtctctgttgctggcaaactgggcactcagcagtggccatagccaggtcagccttggtgagtggaagtccatgttgctgagcccatgtgtaacctccatccctgctaccatggccactttgttcatggacccactgggtgatgacgggggtggctggggaaagaggctgagtggtgtccacagaaagggtcatcctattcacttgattattaaaattctcctctggtgaggtcccccgttggtgagcactcacatgggatacaaatatcttcacaatttttgaccactcagagaggtccatccacatccctcttccccaaatttctttgtcaccaattttccaatcatgcttcttccaattccctgatgatccagccaaaccattggctacggcccatgaatcagtgtataatcacacagctggccatttctccttccatgcaaagtgcacaaccaggtgcactgctcgaagttctgcccactgggaagatttcccttcactgctgtccttcatggatgccctagaaaggggctgtagtgctgcagctgtccactttcgggtggtgcctgcatatcatgcagaaccatctgtgaaccaagtcctagtcttctcttcctctgtcagctgatcatagggaactccccacgaagccatcagtgcaggctaagggagagaaggcagggtggcaggagtggagaccagggcatttgaaccacttcctcatgtaacttacttgtgccttcaggatctgctcgagcccaatcacgtatataccacttccatttgatgatggaatgctgctgtgcatgacccactttatggctagatgggtcagaaagtacccagttcatgatagttcaggtcgcatggtgacttgaaacattcagtttccaccaaagcccagtaacaggccaagagctctctctcagaaggagagtagttatctgaagaagatggcagggccttgctccaatattctagaggcctccactgtgattcacctatggaggcctgccaacagctccaatcagcatccctatctgccactgacacctcaagcaccattggatctgctgggtcgtatggcccaagtggccaagcagcttgcacagcagcctggacctgttgcagagccttctcctgttctggactccactcaaaattggcagcctttcggctcactcgataaatgggctggagtaacacacccaaatgaggaatgtgttccctccgaaatccagataggcattgtgctctttcttggttgtaggagggactaaatgcagcaacttatccttcaccttagaaggaatatcttgacaagccccacaccactggacccctagaaattttactgaggtagaaggtccctgaattttagtcatatttatttcccatctcctggcacataaatgtctcaccaataagtccagtgtgtttgctacttcttgctcactggatccaatcagcataatgtcatcaaactaatggaccagtgtgatatctcgtggaaacgaaaagcgatcaaggtctctccaaataagattatgacataaagccggagagtttactgtcctacccctgaggtaggacagtaaaggtgtattgccggccttgccagcggaaggcaaattgcttctggtgggccttatggacaggaatggggaaaaagtcatttgccaagtcaatggctgcataccaggtaccaggaggtgtgttaatttgctcaagcaatgaaaccacatctggtacagcagctgcaattggagtcaccacttggttaagcttacagtaacccactgtcattctccaagatccgtctgtcttctgcacaggccagatgggagagttgaatggggatgtggtgggaatcaccacccctgcatccttcaagtccttgatggtggcactaatctccacaatcccttcagggatgtgatactgtttttgatttactatttttctaggtagaggcagctctaatggcttccatttggcctttctcaccataatagtccacaccctaccagtcagggagccagtgtgggggttctgcctgctactaagcatatctatgccaattatgcattctggcactgggaaaatgaccacaggatgagtccgaggacccactggacccactgtaagttggacctgagctaaaactcctttaagtacctgacttccgtaagcctctactttactggaggaccacagtgacattttgggtcctctggaattaacgtcagctcagagccagtgtccagtagtccctgaaatgtctgatcatctccctttccccagtgcacagttaccctgataaaaggccagaggtctctttggggaaggatgggagaaagattcactgcatacattgtcggtaatgtagtggggtccttcctcaaggggacccgacctccccttcattcaaggggttctgggtctgtaaactagctcaagtctggaaattgattgaagagccatgattctctgtttttataattcaaattagtgttttggccatttgacctagaagttttctgcttgtataaattaagtaggaatgcagtgggcttcctatcaatttcacttctaggaacaccatgattaattaaccaatgccggagctctacacgagccagactgttctgattgctgctttgcctctgctgtccattagggtagctgtgcccacctgaccttatcatatctagtttttgaaacatggcagggaaaatgattccacgtaacctgaccatatcagctgggtgactgaataaaacaccttctcagctcgctttcctctggcctgaagctttttgctgtagctgcttttgcaacaaaggacacagttgtaggcagtggatcctaaatggaggtttcctgggggactttagggaaagcttatattttcctgataaaactgtcaagtgtggccaagataatacttccccgttttctgactttaatgaaaatacaaggccctcaacagagatagctgacttctgactttgggagagaggtcagggaacagcagtgatgctgtcgctgatgtttttgagctattggtctgatatcactagaggcttcctttacatatttgagccatcctaaatctataattttctgtttacttgtagccaaaaatattctaaatgtttcaccctcatactttttgagaaaaaaaaatagcttaataataataaagtaccttaaggcaatttgccattcttttcctttcttcaaaatcagcaaagcatggcaggacacatctgaaagtctgtttactgttgtttttgttgatgttattggcaggcagggcacttatttccagcagggaagaagcggacccagttaaagggatctagactctggtcgtcaggaacgggtcaaggccttcaccatgagaagagcaccaaagggagttaatatggggttgaccagaggtaggcaaaggaaggcctgtgggccaaatctggccagctacctgtttttataaataaagttttattggaacacaaccatgctggggtttgtttcatatttcctgaggctgttttcacactgcaatggcagaggtgagtggttgacacagatgccgtctcaccaaagcctatgatatttactgtctggccctatacagaaaaagcttgctgacctctgggttagactgtcaggtggtagagactaaggagggagtgataagtccctgttggccacctgaggttttgtctgtgtcaggaagctgcagatgggagatgtccaggcagtggctcagaagaacccatggaggacccattaggggaagggttggtatgtggacaccagccacgcccagggtgaaccagctgtgcagtcaaatacagaacttcccgtcccttacacctccattctctgtgtttcaattttagtgaagtcagccacacccagagtgaaccaaccgtgcagtcaaatacaaaacttcctgcccctcacacctccattctccctgtttcaatcctggtgaggtcagaggcacagtcatgagcaaggtggggaaacagcagtaaatccaaccacaacacctctcctccccgactatagaccgccaagcctaaagcaggcccgtcacgttggatgccagatagaaactttgatatgagataggactggactcaaaatgcctaaaatcaaatgtatgaccacaaagcttttcgaaaaatgtagactttgtccaagatagcattcaagggttgagaagtataacttacatggcttgttagaaagcagttgtatggcaagagagggttctattaaaatgttattccatcatataatttctatggagaggaatttggaaatggctagcaaaattacatacatttatcctttgactcagaaatccacttctgggctgggcacagtggctcatgcctgtaatcccagtactttgggtggctgaggcaggcagatcacttgaggtcaggagtttgagaccagcctggccaacatggtgaaaccccgtctttactaaaaaaaataaaaataaaaataaaaattagccaggcatggtggtccatgcctgtagtcccagctgcttgggaggctgaggcatgagaattgcttgaacctgggaggcagaggtttcagtgagccgagattgcaccaatgcactccagcctgggtgacagaatgagactctatctcaaaacaaaaaacaaaaccaaaaaaaaaaaaagagagagagagagaaatccaattctggaagtctatacaaacattacactggggaaaaatatgaaaagcaattcacaaggctattcaccgtggcacgactgtcatagcaaatgattagaaataacccacgtgtgcctcaaaaggggactggttgattaaactatggtaaatctacaccatcgaacatgatataaatgattgagaatatctttagatactgcaagtgagaatagcaaggtagagaaaagaggatagatgtgtaccactgttcacctaagaaggtagcatatggcacatggaggtgtctttcccaagaaacttcccaggacaaaggtctccaaagttagaggatgcaggaagaaattagaatgtctgaatttgttttgcctaaagcaataaagaatttggctttggtaagttgtgataaacacaggtaacctcgtttggttcacctgccgggtgtcctggtcttcgttgacggtgacacactgcagaggtctggggtctagggatcgctgattctgcagctcagtgagcacaactggtgcttcctcgaatgttcttttgcttgcaccctgctggtggcttcggtttccaggattttgtatggcatcagtctggtttgtcttttattttattttatcttattttttgagacagggtctcactctgtcactcaggctgagtgccatggcacagttactgctcaccgcaggttcagcctctcagacccaaggcatcctcccacctcagcctcccgagtagctgggaccacaggtgcatgccaccacacccaactcgtttttagttttttgtagggatggggtctcactatgttgcccaggctggtctcaaacttcagagcttaaggatcctcccaccttcgcctcccgaagtgctgtgattacagggatgagtcactgcacccagccagccaggttttttttgtttttttttttttttaaagaaatacagtctctaaagatgagttacatgattttatttctcagaaagtcacagttccagatttgctgacatttatggtgttagcaagtgactggcagtggtatggtacttagtagatattgaaaaaaataaacacaaaacaggtccctttaagatgatattttaatgctaagtgagaagcgtaacatctcctgctgtggagaggtcttctgaggatgatagctgtacatgtttacatcattagttgatttctactaccaaaatggagtaagttggctacctataaaacacttttgaacccttaacttggagacagaatttcctacctatgtaaaaatcttccaaataattttgcttgtgttaaaaaaaaaaaatggaaataagccgtaccttccggttagtttgctagttactgattgacattaggaaatatgcaagttgactattcctaatctccattttacaaatgaggaaactgaagcacagatcagctatatggctgaggtaacatcattcatgagggcagagccaggatttgaaagcaggttggctggtcccccactgtgtgccctgaaccagtgtactaagctgcctcttgtgtgttttataaatttcaaaatgtatgtgatgtacaaagggaggatatgcataaggggtagatatatacacacatagaagttaaatactcaaaaatatttatttttatttttatttttgagacagagtcttactctgtggcccaggctggagtgcagtggtgcaatctcggctcactgcagcctctgcctcctgggttcaagcaattctcgtgcctcagccccccaagtagctggaaatacaggcacgccccaccacacccagctgatgtttgtatttttagtagaggagggttttgtcatgttggccaggctggtcttgagctcttggcctcaagtgatctgcccacctcggcctctcaaagtgctgggattacaggtgtaaaccactgtgcccagcccccaaaatatatattttttgatgggctagtttatccccaaattttcaaagtcacttgtcactgagaattctgaagccttgcggggaatgatgggcctcgtctgattcaagagaaattgcctgtttctgagttgagtcgtagtgtatctgggtactcaggctagatcctagaatatcacagatgctcaggagcgatgcattcacctgtctgttcctgccagggctttccagctgccttctttaataagctcctctaccaaagcagttccagatagaattgaacaatctttttaaagcataaatatcagcttccaacaggggtctccatgcagtctctactctacgggtggcgtatttgactcctctttccagctggctggtgtgaacacacccactcgagtttcagcaccactgcccttttttttgttttgttttgttttttgtttttaattttagtatgagtactgctagcaaaaacagactgcttctggagcttcaaccgaataaccatcacccttctaggcaacttgggtgatgtgttggtggatctctgtacgctttttatttatttatttatttatttatttatttatttattatactttaagttctagggtacatgtgtacaatgtgcaggtttgttacatatgtatacatgtgacatgctggtgtgctgcacccattaactcgtcatttacattaggtatatctcctaaagctatccctcccccctccccccaccccacgacaggcccccatgtgtgatgttccccttcctgtgtccaagtgttctcattgctcacttcccacctatgagtgagaacgtgcggtgtttggttttctgtccttgcgacagtttgctcagaatgatggttcaccgccttcttttttaacaggaaccctctcagaggtcaaggtgctgcccagcgtctgctcctctttcccctttcctccttgtggtgccggggaggagctggctgccggagtcccttcctcatcttcctccacctgcgccttcctaccctccctccctgcctccttctggagggagccccagggaggaggggaaggctggcgaggaggaagaactgagctctgctggcagctgctcgggggtctgcaagatgctgaggatgctgcagggggtggcagtggggctctgcccagcacctggacggaagtgtcttgtctgggtgccccggggaaagtagtaccacccagtgtccaaggagtggttggttgcccaaggagtagggcattttcctgagacagcttccttctgtcctgtgctagggaggcgagcttcctagagtggttcaggcttccttttcttaattcagctcagaagggcaagagaaaagccagtgcatggatcccactcacgcttcctacttgttctagccgggcttcgattccctccgcacttctagcttctgaaagcagagcctctcccagccccagctctcactggcaggcaaggtggtgtgtgccctgcccctcaggccaggggcggggatggctgccgttgttgtaggtcccttgtgccccgctcacacctccaaaaatagcccttccatcataacctcttcttcccacctatgagtgagaacatgcggtgtttggttttttgtccttgcgacagtttgctgagaatgatggtttccagttttatccatgtccctacaaaggacatgaacaatgagaacacatgggcacaggaaggggaacatcacacaccagggcctgttgtggggtggggggaggggggaggaatagcattaggagatataactaatgtcaaatgatgagttgatgggtgcagcacaccaacatggcacatgtatacatatgtaacaaacctgcacattgtgcacatgtaccctaaaacttcaagtataattaaaaaaaaaaacaaaaaaaaaacccaaaacctcttcttgggagctctggagtagaattctctttctggctggactctgataaatacagctggtgaccattatttcagaatgaaatttcgtttagtttatgagtctgtccaaatatttcgatcatttaaattcagatgttagtttacctcggtttgtggagaatggactgggctgtagaaacttagaagccaagcgaatgtggactccgctgtcttcattgctgtcttgttactatggatgtcggattaggtgcacccgtgaggtcttggattgtaaccccatgttctgcaggtctcaggacctcttccctgcactgtgctagcccggccccctgtgatggactgaattgtgtccctcaaatttatacgttgaagtccaaacctccagtacttcaaaatatgactatctttggagatggggccttaaaagaggtcatgaagttaaaatgtggccatgagggtgggccctgatccagtctgacaagtgtccttatataggacatgcagagagacaccagggatgtgcgcagagggaccgccatgtgaagaagcagcaagaggagcaagaggacggccatctgcaagccaagggggaagccacctgcccacaccttgatctgagacttccggcctccacaaccgtgagaagatacgtgtccgttgtttaagctgcccagtctgcggtgctttgttctggcagcctgcactgactcacaaacccacttctgacctaggccctgactgggttcaagcatacacagcctggccagctcagccactgtccgcattcacagcctcctgcagcttccactgctcaggcatcctgatcctagccttcttagttggccattgctcaccagaccattttatatgggcaggaatgaggagacaaggaggccctcagggacacagttgcccctctgctgtcttaccctacctgtcttatcctctggaccatgcaaaatgtttatcttacgcagtcttttgttctttggtaaatgcatataacagacacatacttagtatccatgatgtcccagcagccccgcagctctgatcgtagtagaggtggtttaaagagaaatgcattaagtagagttgagtttgtttttcacaaatcaagacacatcccacttggggcaaagtcgtgacattcaggtgaacctgaaagttatagcttcttttatagccagttatccaagggctgaagccatcgagctgcctgccttctgagcacttgaaacaaaaaggattggaatgtttggtacaaaacccagcacttaaaacctatgaggctttcagctgtgactcttactgtctcgcctccatctgggaagttcattgatcttcaaaacctggcaggctcctcaggggagagaaggtttaagatggagcagccagctcaaatccctattaggtccaagagccaagaggcgcaacgcacagctagttgggaacatatgaacaccctcccaaaaagctgcaagactgttgtgcgtgtaaatctaagtgaggaaattatgtggtgaaatgggttttttcaaagtttgcacttaggcccttttccgaagaaaatctgtgttgacagtggagggagataatgtttgagttaattgatgagggttttaagcagtaatcaatatttcccaaactagcaaacccagcatgttttagggtcattttcaatgattaaaattaaaatttggttgtttcaaaactttggttgaatgctaaccactggaggcctggtgttggatgaacagagcatactgggatgctaaaaaatattaagtgcaaatcccatctttgtctgaaattggtttttgtataattcctgttttaggaaattgtgaaatcatgtaagacagttttcactataaattattttcaaaagtctttgtgctaaatgatcaggcatgaccgtagtgagctgtttgttatttgttatggttaatgcttagttgccatgtgcggaaactgacggttagatgtttgattaggggattgttgaaggtggtgtgagggctggatattgaccccagatgagtttttgagatgctaccatgatgaggaaggagcaggaaatcatatcacacgaccaatgcttggaggatttcgagggggtatgcagcccacccacctccaccccagagggatgccatgggtcctaggcaggaaacattctacactcaacaagctgccagccaggtggaagagggcattattgcagaggacaggcttgagtctgctggaaagcagtaggggatgggaagtattcagccaactggacgtttcctggggacaggcaccaagtccctttcactagctgtttatttctggataggccatcgctcctggcactggtcagaccctcaacaaatgctatggaattaaactggaaaagggagaacgtggtgaaaaatatgccctaacattgtaacaagtcataaggtaatgcacttcccatcactgaaaaacccagcagaaacactgtcacctctgcatgctgatagacagcagtgcggtcactgagagacgggaccaatcggtgctccccagacctggctgatcagcagttacatggggacctggttaaacatatggattccaggcaccattctctgggctggagatgtatatattttttaagtgtctgaggtgattccagtgatcaggcaggacaaaatgatgaccccccaagattttcatgtttcttcataaaatctagtgcagtgactgagtctggttattgttttggtggagaagttactgtaatccacatgtgactgcaaacgtttggcaaatcgatatttcatggacacgtgatacttgtctggtcctgtcctaggcactgagcatccagtaggtgcaacagtcaccaaaaatcctgccttcttggagcttactctttcatgaaagggacaggcaggacaacatgttgtaggcatggtgatagagactatgaaaggatggtgacagatgctatgaagaacattaccacacgggcaaaggaatatcagcggtagggaagtgtcacaagttcataattatcatggccagggaaggcatcttcaatgagggagctctggagcagagacctgaaaaaggaggggtgggagagcaaggtgcttggggaagggtgtccaggcagaaggaagagccagtacgacggccttgaggaggagctgtgcttgtgtgctggaggaacccaaggcggcctgtggtggagcctggtaggtgagctgtggggaggaaggcttgaggaaggtgggggagtgctattgttgagagttgcctggctgcgagggtgaatgaggagtgtggttttggaaacgccaaatggagatgccattcctaatacccatggggagagcacctgcagcagctgatcatgcctctgggcccagagacacctgaattttgagagtgtgctacacagaggtagcattcatgtgctcccatggactgagcctggggagaggaggtgaggtcccagcacaggcgctgggacaccccaaaacttagaggtggggaaggtgaggaagggtcagtaaagggccccaaggaggaggagcctggtgaggcaagatacctgaagacggggatgggtcagggaggaaaggagttttgaaagacgtcaaacccctcagcaggtcagccgtggctggagaggacattgctacagagagaagagctgtttttggggggtggtggccccaagcgagaaagggaggagaggacctggagcctgtgagctcactcagctatttcaaggggatttactgtggaggagaacagagagatagggctgtggttggaggacaatgtggggtgaagcccaggctggagtgcagtggtgcagtcttggctcactgtagcctccgcctcccgggttcaagcaattctcctgcttcagcctcccgagtagctggaattacaggcactcaccatcatgcccggctaatttttgtttttgtttttgttttgttttttgtttttttagtagagacagggtttcaacatgttggccaggctagccttgaactcctgacctcaggtgatctggccacctcggccccccaaaatgcagggattacaggcatgagccactgcgcccggccaagagttggcattttctttctcaagatgggagatatgatgtcccatgtataataagcgggagtgatcctgggagagggggaaaaactgatgatgcagaagaaagggaattaggggcatgctgtcctgagtgggcactgagtggggtggtccagtgcccacggagaggggctggagctaggaccatgggtggtacctgtctccactgctgctccagcaaacatatttaacactcacgttcaagggctgtcacacgtatgttgaagactttgccaaggttaatatgttgcaatttttttctccaagtcttcttcatttttcctgtctctagaatgttctgaaagatttctttatgacttttctataccataattaaagcaaacgtctgtattttgctggccatagaagccaaagagggatgcatctgtcatttctcttctgggttagcattctttcaaaatatctggacaccataaaaatgtagaggtcagtcaatagagatttaatgctttcttgtgagaaattcccttggaagggctttaagaaagtctttttagaagagaataatatctttgatcactatatgcctattaaaatactttttttttcttgtgggtttaccatggaaaaaaacatcaaagccttatatgagccacatagaaatagcctgtttcttaaatggctggcctgaaattagcgaagggtagcaaattgaacacaatggtttttctgtgttgcgcattcagtttgggctgatcagatcccatgcaaaaagattactgtaaaacgaagatgaaattttagattttaagaagatttcattgtaaagctaggtcacagcattccacattcaggtgagtactaggatttgtagattatcagtcattatcattaacatactcacatacaattgtcattgttgctaagaagtgtttgcaccttttcaacacttagaaattaagtcacattttctgctttcaaagcccttaaccttaatcaatattttataatgtgttttcatagatgagatacatttgagttaccccagttataagatggttactccttgcaattattctagatatgaagattcatttggctaaaatgtggtaaaattgcaaggccattcagcaggtcagttttaaatacaatatgattattattccgtcatctttgtgcgtgattgaaaataacagattgtgtggttggcaattcgcttccccattagaaaatttaccttcctacttctgttgtgtcttacatagtataattattctgttgccttgaaaaatattataataaacagaagggctaatttttttaagcgtgttgggtggccgaggagaaatgaaattttgagtggaaaacctcacatgaattgtctgtagttgcttgtacttcatccctcaccagtgcaaaagccaattccacaggaattgaaaactgttatgaaagagaagcctggtcttccgtcttaacatcgggtcatgaattcaatggggaacactgtatcttcttcatctctatgactcaggcacatagtagctgctcacttaatatttattagaaataaatatttactgaaaaaatgaatctcccccaaagaactgaaagcagggtcttgaagagatagtcacacacctgtgttcacagcagcatcattcacaatagcaaaaggtggaaacaacacaagtgtctgtggacagttgaatggataaacaaaattctggtctatacttatgttttagtttgggctgccctaacaaagtaccctagactgagtggcttataaataatgtcaatgtatttctcttagttctggagactggaaacccaaggtccaggtgccagcatggtcagggtccaacgagggccaccttctgggctgcagactgcctgctcttcattgcatcttcagatggcagaaagagggtgagagctcctccgtcctttttataagggcactaatcccatccatgaggctccatcctcatgacctaatcacctcccaaaggccctgcctcctaatagcaccaccttggggattaggattgcaacaaaaggcaggggatacaaacaatcaggtcataacagcatataatggaatattattcagccttaaaaaggaagacggttctggcacatgctataacatggatgaaccttgaagaccttatgctatgtgatagaagactgttacaaaaggacaagcactggatgattccatttatgtgaggttcctggagaaggcaaattcatagagacagaaacattaagggtggtgtccgcaggaatggagagtgaggagttgtttaatgggtaacgggtttcagttttgtaaaatgaagtgagttcctcaggtgggtgatgatgatggttacacaacaatgtgaatgtacttaacgccattgaacttcacctttagaaagaactaagatggtaaattttaagttatgtgtatttaccacattttagaaaaaatgaatgttaatatctagaataattgcaaggagtaatcatcttataaattgcagtaacttaaaagtcttgcctgatgctgcagcaggcgtatatgccttatctctttctttttttatgtttatttaaaattgtgacaaaatttgaatgttggtaactagggtaaagttaacgatgttctttttctgtaagttcaggtttggagtgggtcttcaattgctgtcatcaactcttgagcaaaagagaacatttagtgaaactccagaaacatcttgagaactaagacattacacctttgataagaatttattcacacttctttagaaaatgtgcaggaagaactaatttgtaggtaaaatgacatgtcctaaaattttgggaaatgcataatgggttcttaggggttctttcggagtggctttagttgtcgcttgggaaaggaagaagctaattagccctgttaatagaaatgttattctacttatccccctccccaactatcatcaaagtatgaaggtcagagctcttttgtcctttttaatagtttgttttcttaaaagtggttgagtgtgaattttctcttgcatgggaaaaggatcattgttttcactggcatcagtgaatgcgctcacacatgactgtttaaatatgtcttcattcgttagtcagtaggatcgcatcctgctggaagacagattgtgtaacctcagaggcttccagggaaactccagtcccagggagagagtgggacagtggcatgctctatagagaaagcactccttgttctctctctctgcctccccaaccccgccccactgatctccctcctggtgcaggagggactgttggagcagaagaaaacatccagctcacctgtcactgaatagcccctgttgcaaaggaacacaggctctctggcctccagcccacatctgcggaagcttggttggagtgaggctgcttacggctgctcccctttcagtccatgtttggtttctgcatccaagaggcagagtgagaatcagaccctggtcgggggtgatccctgaaggcaacgcagtcatatgcagtctcttggcaagcagccagtgctctcagctgggacaccctgtcttcaggcatgctgctctgtggccccgcttacaatggtgacgttgcctgattctggccctggttctgcctatcactggccagacagccctaaaccaagctcataccgctagggccttaggaagggagaggaatgcaggcaaaagtcgtctcccatacacagccacctaaggaggaacagagccttaggatgttaagtggaacaaaccaagtcacgacccacatgtaagaatgtgaccaagagcgagaaaacccacagacacacctttctaagggtggtggcctacaggattagtttctctttctcttccaagtgactgctctccccacaccttggcctccaccagaggggaatgtgggcagtgcacgcaggaccgcacggtgtcttctgcaggggtgaaaacagtatttgaagcccctgtgactgcaggtgcctgcaccttctgggggtgggagagggcatgaaatcctatcagcaggaaagtccatccttgctgctctgctccactcgcccaagccgggctgggaagagaggagagaggacttcagaggtacccaggctattcccagggggaggcctgtgtggtccccgtttgttcggagatgataaggagtccattcgagggaggagctgccttctgaacatgggagtggctgacactacctctgagggtttcagtgcctctcccgtgtccagaattcttctgattctgatgcagggggcaggatggcaggggtacagggtaagggtatgagggctcaggggctgctgaggatgggggtgtttgttttgttttagttcctgccaccccaccctgccctctgctccccatctctgcctgggtcacccatcactgaaagatgtcagttgcacaccaaggtggctaccagagggagaaaaacagcccctaggggtagggaaggtgggagttccgtggaggcagcacctggatcaggagagctgggcagccaggggcagaacaaccacctgccagggtgggattaaaaagcaggcatcctcaccatagcctaggatacctttggattggagcattcccagctggaacgttgccctcttgcagccacgtacaggtggtgctgacactcaggccgctcccaaacgttctgtcgtgcggttatgtccaccctgggttgcagcccatgtgcaccctgggaggactgctgaacacaccgccaggccatggagattgtgcacaccactgccggtctgtgtccagactagcagcaataaggattctgattctgattaaagcccctgtgactgcaggtgcctgcgccttctgggggtgggagagggcgtgaaatcctatcagcaggaaagtccatccttgctgcttccctccactcgcccgagccgggctgggaagagagggaacagaggtgcccaggctgttcccagggggaggcctgtgtggtccccgtttgttcggagatgataaggagtccatctgagggaggagctgccttctggacatgggagtgtggctgacactacctctgcgggtttcagtgcagagataaggaatgccagtctggtggataatttgatgcgtgcctttttctgcagagtgatgtatttgagaaacagccctgtaacgagaaaaagccgcactacccctctttaagttcaaacaccactgtgccaggtgcttttatagaggcaggacaaggcacgatgctcagagcaacactctttattaacccagggtacagacaagggggctgaggctcagagagggtggcaaccctcagattctgcagcgaacaagaggttgagctggggttagaatctcggtccagcacaccctgaagtcactatcctttcctgcatggagaagacacaggtgtatcctgggaccatggctaggaaatgaatgtgaaactcgcatcctgtgaatgttatgaaaggacatagttcccaatatgtttaagggcgttggctatgggtttgggatgaaacctctccccgttgtagaaatgtgtcctttctactcttcataagggatgtgtgttatttggaaagtttcaaaactcagtcagggaggtcccccttccccctaaccaacctatcaccccaggaacgaggtttcagctgcagaggtagtgacagctcccaggtccagaagaattaggatttggggacttggatttgagtgatctcttaggttcttaaaacgggcctcctacaccctaaatactgctccctcaacttcaacctccacagttggtatcaacctgctgtcaactaaaagtaagctcctaagccccccaccaactgaacagacccttctttttgccaaggagaccccccaaaaaaaccttaaaaacttagttctcagccatgatgggacaggagatcagacacaccttgttacactttctcccttttatggtttaggcacaacggctgaccagtactaatgttaaaatagagaatagaacagactgtttgtggcaacaagataccaacttataagcagcaacctcaggtcacgccaggcaagggttgagccgcgtactctacacttagagaacggattctgttctcatggcacagcgtcttctttttctccagcagctaaaacactcaccggcccggagatcagccagattcaaatgactgcagctcatccgcccacagacgcagactgaccccgttccacagccatgactgcagctcggattgggcaggagactgacttcaggaacctcctccagataagagacccctgacagtggactggctctggttgctttacagaggctgctcacttgagtgccttcaagtcctgaaaagacctttttgacatttagggcctaactgtgatacacttaaatgttaagactccagcccagagtgaacacaggaggcatgtcacatggatgttcaatatgcgtgcatcaggaccaccttcatgaatattcatagttcctcctgtaaactgctgaatatgtatgtttagccaacccattcagcgtaaagctccttccccaacccctcctccttcaaagtgcctgtctctgttcttgcacaaaggcacacttcccagactgcaggatggccgccttgcacctttataagaaggtattcttttcaccttcccaaatgtataaatattgtgttgattttttttttaagtgaacactgctaaatgctaagcatttggtggaaaaccaccacattccagaatcaggcagccaagcccatccccattcccccctccccatccctctccccccttcactgccaccgtccacttggcagctgtggttttcccaagaggagcccaggtatccatgtgtctctcaacatgtgtctttctagtaggagcctgtacagcaatagtgaaatggctcacactctcacacatgcacacacagccagaataaattgtataatcaagctcctcttagctaagttctgtaacatctgtttgtgttaagtggtgctctttgaaaatgattcccccctccctttataaaaacaaccttaattttagattgtggagaaatggcgcatgacaattatttttgctttcttcaacaagatgtgtttaagtaaatgagattcatttctagaactgaagcgctgaaagagcctgattaacagaatcagtgcctacaatcatatgtaataactgtgggcaaacagccccgcgtggctgggctgcagaggccactgctgctgtgggttcggcttgccggcagacttcagcagatgggctgctaatataattaggaatcgttgtgttaaatgagccattatttaaattatctgctaattttcctatctattaacctgctgaaatagagagagtaatatctgagaaatctcaggctgctaatcactaactagatgaatcgcccagtttttccctttaatgcaacattttaccttattgcagcaattagcaaatggctttctgtagggttattgcccagtgcatcaaccagagattaagaagggacagtgggagacgtccacagtctgtttaggtttcatccaggtggcagattggtggctagaccatggcttctagccgaggaggctcttagctttctcgaccactgttttcttgtttatttcatagtctctgcattaaaggatatttggccttcagaaagcttctcttagtccatttgggctgctataacaaaataccttagactgggtggcttattgatggcagacatgtatttcttacagttttgggagctggaagtccaagacccaggcactggcagattgaggtctagtgagggctttgtgcttcatagagtcagtgccttctctctgtctccttacatggcaaaagggatgagcgagcgctctcacgtacttttgtaagggcactaatcctatctcttagggccccacactcatgatctaattgcctcccaaaggccttgcctcctaatatcagtacgttgggaataagggttcatcatacaaagttaggggtcagggcacagacattcagagcacagcagagcataaggtgaggactgtgtgagtataacttctctcactctccctaccctgagacactggtagggggcaggaaagtgaggtaggcgggaggaggaggtcaatacagggtgcactcagagtgggctattgcagtgcacatctggggctcaaccccaccaaggacttctgggggatgacacagagaccactccaaactgtttgcctggggagtaagggagcaacggtttggacccaccagctgtttatttttggtcaagggctgctcccaggagcattcactccctggtacgtcagacctgacttggacactagataatctcactcctgaggttacagaagctgaagtgagtgcccaaggaatatgggtaggccaccagcaatctctgctgtcttctcgcttctagctttgcttatacttggacatttaagagacaagtttgtggttatttatatagcagctgggaagttgactaagtttagcctacccttgccatgtctagaaaatctaaattaattctttgcacacatgatttaggagtttggcctgttgaactttctccggctacttccaacttcttggcaggtttgttgacctaattggcattctctctgctcccaggtgggggctcatggacatgcttccccatctgaaggaacaagtgattagtgaattcctattagttgcaggcactgtggggaccatcaaaaagagactaagaagaagagctttgtccttaaggaatttacaagctcattgagaggaaagaaaggaaaccgggaaacattagaggacaataaaagacacgagacaaccctagacaccaaaaatcagggcatgagctgtcagagaggagtaaatcagagctgcagctgggaggccttctggggaacgcaggacttagcatgggtctcaaaggcaacagcctttgtacggtttatcgtttactctcagccagcaggcagaaggggtgagaggtggtttctacttgcatcaaaacaaaataaggaatatcaaaccccacaaatcatgctgttgaaaaaaatgagtaagctggctgggcacggtggctcacgcctgtaatcgcagcactttgggaggccaaggcgggcggatcaccaggtcaggagtttgagaccagcctgaacaacatggtgaaaccccgtctctactaaaatacaaaaaaattagccaggcttggtggtgggtgcctgtagtcccagctactcagaaagctgaggcaggagagtcgcttgaacccgggaggtagaggttgcagtgagccaagatcgcgccactgcatgccagcctgggtgacagagcgatactccgtctcaaaaaaaaaaagagtaagctttgtctgggcagggcccggcatggggagaaagttttgactgtttccaagaacagttctaaaggattcttcctgaaaaatcctttagaatcaaattgctccagaatcagccattttccttgtccagaggttttagtgccatgggatgctgtggactgtgtgtccctggtcaccaggaggcaaactcagtttactcagttttcacaccttgctggctaaaattgcacgtggaaccggcgctagtgtttatttgctcactcaccgtgagccagcaccatgaggagcacgtgtcacagcatttacttctcacaagcaccccatgagaatggtcatcaccccctttcctagaagagggagggtgcagagagatctggggagaggaacccacctcttccaggtgccaggcactggtacatgaatggtggagggagattggaccccaagccctgcgtgcattcagtcattctgctcagtgaagtgtggacagaatttgtttgatgggagggtagaattgttctcaaagggcttgtgacacaggaggaagacgtccacgttcaggacatgtctagttcctacccatccgtgatgtgtgcataatggtcatccctcttttataattattttgtaaaatctgatgatgcggttttgggcagggctgctggaactggggcatattgtcaaggaagtctatgccaaagacgaacagttttcatcgtgggggcatagaattttcacacatcttctggaatagatcatctaaactcttttactctcagattttctgtataattggtaggtgctcaagagatttgctttagaaatgaacaagccaccttccttttgcctggaatgtgcatttctgccacttgcccttcactgcatgaacgtctctctaaccttgactttcatttattcattcaacaactgtttagtgagcacctactaggctcccaggcactgtctgaggtactggtgacaaagagatgagccacatgtggccctactgtcagctgtcatggagggcgcactgtgctggggacattatctggagaagacaggctcctgtgtgacggtgatgcacccaggacaggggcacagaagccttgggaacaccatgtaaagttagaggaagaggtatggggggagggcagagatcagaaggaaggactgtggggggcaaaccaggagggcgcatttccaaagcttcactgaggcctggtcacttgcggccagcactgcctgcaggctggacaggtcaggggagagctcagagatgaccgtgggcctggagcacgggaggtcactggtgagcttggccggccatggagagctgaggcagaagctccatctctgcaggtggaggagagaaagagagaaaggaattgagacgggaggtggcccactgctggatgcttgaccgcaaagggggaaggaacagtagctggagggagtgtgttttgggttttgccatttttaggaaggcgagaagaaattagccactgagttcctgcagttccacctccttaggtctctggcagcttggatcacagatggttttcaagggcaggtcctggtggacaggccattctccctactagatgctgcactctgcaggggccaggacacaggcaccatcatctttgctgctctcaccccatgccccaggttcagcacagcaaagacccacatctgccctgcaaaggccctcgaggccgctgatgttggcggcagggttggagtagttaaaagccagtgattttcaaggtagaagactccatccagcttctgctggaaaaccggtttttgttagttgtgattgtgttctggaaaaatggaatgtgacttctatgggaggctccctagtatcaggaaggaagcagggaacaggggcggggacgtcgggacctccatgggctgtttcacatctccaaggcgtttctgttttcctcagatgtaaagtggggatctgtctatcgtatgagcttttgagtcattttaagttatgctttgcttggaagttaagaacattccctgaatttgagaatatatattttcaatgaccttttatgtagctggagggacatggcccagggctaggctggtgtgtgtgtgtgtgaatacatgcatacatgcacgtgaggttgaacccaaagaggcaggaaataattttggaaattcctagaataaaggaaggggcagattaaattgctagcatgtggcatgaggtgaggaacctggaaggagcccacagccggggtgtttgagttttccgttgtttgagagcgcgtcgtgtgaaatttatagagcaggtggcattactatttttatctctgtggttgaggctacttgtgaaagtgggtgatggtcctggctagaattcaacacgagaaaggtccatttccagtgtcaccacacagaaaatggtggtggctcctgcgggccgctcagacacatgatgtgatgtacagcccagagcgtttactgtgccctggagactcagcccttgcctgactctgtggctgccttatttatttggggccatttctctcagatcatatgctccaggaacgaccatcgtggtgactggctttgccaagctgtgactctgagttgaaccttcttgaaaactagcttttgctggaactgccacggaagataaggttgtgctgaatgcctgggcaatgagaagaaatcacctgtgtaaaagaatgcagtccacactttggtctgactttctctgcatttgtgttccctgcctctgcggaggagtgacaccccctgagaggcaggaccgggtctgggcgtgtgagaacgagctccggtcatgaggcaatgcagaggctgcggtggagcttcagagggagggaagcagggtgaagcgtctctggagagagtccccctgtcactggggctgctgtgtggagggcaagtcttgttcctgccttggccctgtctagttacgcagtcgcagtcagcgcggacgtgcgttgccagcctgaccggccgggtgtgggatctcctgagctactgagtgcagagttgccagcgagacccagaaatggttgtgaaacagcttccacgatggacagtgggcacagggaggaaggctggtcttgttcagaaatctgtagctgttctttttttgtttttttttctctgagatggagtctcgctctgtcacccaggctggagcgcagtggtgcgatcttggcttactgcaacttctgcctcttgggttcaagcaattctcctgcctcagtctcctgagtagctgggattacaggtgtgtgccaccacgccaggctaatttttgtatttttagtagagacggggtttcaccatgttggtcaggctggtcttgaactctgacctcgtgatctgcccgcctcggcctcccaaagtgccgggattacaggcgtgagccactgcgcccggcccaatctagagctgttcttatctgtgactttcaatggccaagaaaacgtatttcctactgttgtgcaattagttatttttttagggcgattgatgtttcttgcctaacatccacactgtcctcttctcaagccctagtattctctgatttgccttgtaaaggaatttttgtgtgtttgttttctgtctctcctttacctctttacccccctcctttccctctttaccccgttttagccaagcaacttccaaattcatcttgcctccagaaagcatttaaatccccaacacagagacagtggtgaacactcagggccctgtgccttccctgtggcagctcatggcagctttggcgaggtatctgctggttgagcctcggtgctttccagcctgggtgctggacacgttgtactttggagccccctcccagtgatggtttaggtcccggcccttgctcttttcacatcagccatagaagtggcttttgctcttgtgataatcctaagctggatgcaaagaaggtgtcacagagccagctcggcaggcagcaaggaggcctggaggccggcaagccttgaagatggacggagcaagtaaaggcggcggccagcagcaagtgagtgggaggcctggggacacgcctccatgacacagcctgagggctgccagcccctaccagaaactgggagagacaagaagggccctcccctggagcttctgtgggaagcgcagccccgcccacacctagattttggacttctgacctccagaactgccagaaaataaatgtatattatctcatgccaaccagtttgtggctgtttgttaaggcagccataagaaattaatgtaaaaagtgagtcccgttttccaggaaacttgaatcagaccaaccaatgttaagatatgtcagtaaaactacagaacgatggttctaatataaacaatacaactatagaactttgtggctatggaaagaattcttcagtaaccaaggagaaaaagtcacgtgtaatgaggaaaaataagacatgctttagatttctccacaaatactcactgttgaaatacactggagaaacatatatataaagtgttaagaaaaaaaatatgacccaaatgcacaaaacccaggcagatcattcttcaagtgtaaaggccatggataggtgctcgcaagcatgaaagcccttggggaagatggtgtccaactttgggtggggcccgtgggaggctgaacaaaacctagccattggggagctgggtgaagtcagagacaggaggactggtaggaaggagagaacctctttccttatagaatgactaagcaactgtgggaaatatgggtatcaaaaacaaatcttgaaaatatataaacaacagtgtaacctatggagaggttggtgggactcagattcctggtgacataggtacattcaccacctcatcttccttaatggaaggaaattctgacagatgataaataaaaaatattggcaggtaggtaaaaaagaaagatgttcatgcattatgtaaaattacaaaaaggcatatcatgaaagtaaaaataatgttataatccagcacttcttcccatcactccctatcctggagcaccccctgtcccttccaaacatcttgacttttttttttttgtgacagagtctcgctctgtcaccaggctggagtgcagtggtgtgatctcagctcactgcaacctccgcctcccgggttcaagcgattttcctgcctcagcctcccgagtagctgggactacaggtgtgcgccaccacacccggctaatttttgtatttttagtagagacggggtttcactgtgttagccaggatggtctggatctcctaacctcatgatctgcctgcctcggcctcccaaagtgctgggattacaggcgtgagccaccgcgcccagccaattcttgatttttttagaagtgtgcagagtggggatcccaaaaatatcattctaagttgctaaatcaagagaagaggttaagatatatcacataaaattgtaaagaaaatgactagaataatttaaaaatagatgtaaagcttgcagttcaccagaacaattattaaacaccagaaatctgtatagtaaagatgaaaagaataaaagaagaaacattatagcagacagtgtcacataggaagagataggatgaggaaaaatgtgtataattggatgcaaattgataaattcatctcttaaaataattcagtttgggggaatgtttaaaaatggtgcagggattctgatatgcctgccccctttgagaatcaggttgtggtgagttactgataacttagtgtttattatttaagagcagaaaaagagagaaccctgtccttcaggaatatctggttcaaccagactgacctagggacggatctccttcacttactttgacctgttactgactatttgatacatgcaagaattactcagcctccaacaatttctctcctgtgaaatccatgtaaatgcagatttgcttggtgtcctctaagtggaaaaaccacacactgatttccctctgctctcacaccacaacgatcaacacagaagacttccgggaccaaatgtgcggggatttctcctcaccaacaaacaatcgatcggttctgcgacagacaccagctgcgtatcctctaatttagttcagttcctacactgtctgcctggggatggcgtgggaccccagagtgagggcccagtcccccaagactgcccccagcttccatgccagttgcgagctccgggtcattgcctgtgcttctgatcgatcggctacaaatggaagatttccaggatcctatccttggtttgattaatttgctagatttactcacagaactcaggaagacatgtacactggtttattataaagggcgttacagaagatacagatgaagagatgtgtaggttgaggtatagggggacaggtacagaacttccgtgccccccctgtacacgccaccctccgggaacctcagctgtctggaaatttaatgaaccctgttcttttggggttttgtggaagcttcgttatgtagacatgattgattaagccattggccattggtgatcagcttaaccttcagctcctccccactccccaaggttgggggtggggctgaaagtcccagtcctctaatcccgccttgctctttctggtgaccagcccccatcccgaagctacctaggggctgccagccatcagtcaactcacagcatacaaaaacacatcactttggagattccagagattttaggagttgtatgccaggaaatggggatgaaatcacatacgtatttcacaatctttcatgcccttttgtacgtttatgagaaattaggattaaatctaacccaaactgtggctttgaaacttggggctgttgagcatctaatatttggatgaagaaccagataataaattattatatataatacattatatatatgtaaatatatttttatatatgtgagattacattctatctgaaatcaacccaaacacctctgtaaaggagcaagctcttacacattttctaggagctgtgtatttgtaaatcgaaattaagaatagagcattcatttactaaaacgaagaggtttaaagtaacatttatagtctcattatttagagtgcctttgctggccaggtgtggtgactcatgcctgtaatcccagcactttgggaggctgaggcgggtggatcacttgaagtcaggagttcaagaccagcctgggcaacacagtgagaccccatctcaaaaaaaaagtatattaaaaaaaaaaaaaaaaaacagtagagtgcctttgccattgttttagattcacttcaaaccttcatcccccaaatctgtttccctaccattcctacaaagtttttgtgaacatgatcttcattggtcgggagggaattctctgaagtcacaaagtagcttttcgtttgagaaaacacaggggtgtgaccacaggttacagcactgcccctggcagatgcccaggactgtcgttcattcctctccactatttccatggcctcctgcaggggaaggggcaatggcacttagtacattagggaagtaggagtctgacagtttctgccaacagctcgaaaactgtgtgtgcagaacctacacacagctggtttgtgtgcacagactgcattattcttgcttattattttggaatctgttatctttgtaccaagggcaaaacgagtgtctttgattttacctttgcaaataattttgttgtcgattccacaaatgtgtgagtgtcggccgggcgcggtggctcacgcctgtaatcccagcactttgggaggccgcagagggtggatcacgaggtcaggagatcgagaccatcctggctaacacggtgaaaccccgtctctactaaaaaaatacaaaaaaattagctgggcgtggtggcgggagcctgtagtcccagctactcgggaggctgaggcaggagaatggcgtgagcccaggaggaggagcttgcagtgagctgagatagagccactgcactccagcctgggtgactgagcgagactctgtctcaaaaaaaaaaaaaaaaaaaaaaaagtgtcagtgtctactgtgtgcctggccctgttacaggcatgcacggcagacagagcagcaaacagcaaaaatccctgtcagagggaggcttcacgctggtggggcggaggcagcaggagctgtcgggaccccgtgaatggcatgattgcgcacggggcccaggcagtggctgagttggttacaagaatgcgctcggagtctgactctgggttccagcctcagctctgccacttacccttgtagagttgagcaagtcagactctctgcacctcagtgtttgcatctgtgacgtggagtgaggactgtgctgccctcagagctctgttatgaggttgaaataagctaatggatataggaagcacgtacagcagtgcccagcccactgcaggcggtgttcagtgtctgctgtcactgttatgtgaaaggtgtggtgttatgggagggaaagggatgcacaggccggcaggagactgggaacagcagttctcccaaagggccagccagggtcagcttcgtggagaaggtggcgttgaaggaagcctggaagggagcgatgggccgtgccacatggacctggacctgggtatcctggggaagagcccccaccccagcaaggtggccaggggaaaggccctgcccctgggggatgtctggggctttcacggagtggcctggtggtcagcgtggctgggaggagtgatgtcagggcatggcgagtgactcagcaggccatgtgaggacttcgccagttactctgggtgacgtgagagccatgggaggtggagggctgactccctctgacttaactgtaataggactgtggtggctgctggttggaagtaggcctaggaaggaagcagggacaccagtgaggacgaggaggggatgacagtggtgtggacccccacagactccttggaggaggtgaggggtgggccggtgtgggccagaacctgaaggtggagccctcgggacctcctggtggctggatgtgggccatgaggggaaggaagccctagggatcacctccggcatggcctggcctgacctgatggagctgctgtcgaccgagatggtcaagtccaccaggagagcaggggtgggggcagctggagctcaattcgggacacgccaggcgtgagatgatgtcccatctcaagatgtttcctggacctgctgtaactaagtacacaaactgagagctgaaaacaacaggaatgggccaggtgcagtggctcatgcctgtaatcccagcactttaggaggccaagacgagaggatcacttgagcccgggagttcaagaccagcctgggcaacatagtgagaccccatctctacaaaaaataaaaataaattagccaggcatggtggtgcacgcctgtggtcccagctactttggaggctgaggtgagaggatcccttgagcccaggagtttgaggctacagcaagtgatgattgtgctgctgtactccagcctgggtgacagagtgagacactgtcaaaaaaaaaaaaaaccccaggaatgtattctttcacagttctagaggcaagaagtctgaaatcaaggtgttggtggggccatgcatcctctgagactccaggtggagccgtcctttcctcttccagcccctggccatggttgtcagtcctttggcattcttgtgactccgtcactcccatccctgtctctgctgttacttggcaccccccgtgtgtctgctttccgtgcattttcgtctccctggaaggacgcctgtgatactggattagagctcacctctgtggtcctcaccttcacttgattatctctgtaaagaccttttttccaaataagggcacattcacaggtgcaggggttaggaacttcagcatctctttttggaaaacacatctcaacccataaaagatgactattagccagccagggaaaggtgttgaataggtagagcccagagtgcatgcgcagcccggggccgagaggtacacttggggttcgtcaacatgcggatggcatttaaagccttgagactcagtggggaccccaagggtgtgagtggatggatcccagaagtgattcctgagctgagccccgggaaagttcagcagggtggggagatgagaagcacctgtccgtgagactaaagtgaggagtcagagaaggaggaaatcaggaaagtgtggggccccgggatccagagtgaagaatatttccaggaagagggagcgagactgagtcagatcctgctgatgggtcagctcagagacaaacactggtcccagctaaactgaggtccttggcaaaattattttataattgttggtaagataatcctaggcaaaaacttgcctattttgatttttttttttttttttttttttgagatggagtatcgttctgtcacccaggctggaatgcagtggtgcgatctcggctcactgcaacctctgcctcctgggttcaagcaattctcctgcctcagcctcccaagtagctgggactgcaggcgtgtgccaccacgtccggctaattttttgtatttttagtagagatggggtttcaccgtgttagccaggatccactcacctcggcctcccaaagtgctgggattacaggcgtgagccactgtgcccatccgattttgatttctttagtctatagctttttaaacctgtttttcaaccttttgggctatatctacgtggtctgtgtttatttctaaaagaagtgttcattctgtaaacaactgggcatgtgtctggacttgggatagatgctgggcataaaatgataagtaacatacacacctgccctgagacatcgttcactggggaagatgagtgaaacagtgggatacagggcaacagcccaatagcattggtccctaggggactgcagattaaaaccacagtgaaataccgttccacacccgttagcatggttcacattgaaaagaccaacaccaccaaatttgggggaggatacagagcacataaaccaaatggcccatggacccattgctcatgggaatataacttggtggacccacatagcagacgtgttcagcaattttctttaaaacagtaaaaatgtatctagtcggctgggtgcggtggctcacgcctgtaatcccagcaccttgggaggccgaggcgggcagatcacgacttcaggagatcaagaccatcctggctaacacggtgaaaccccgtctctactaaaattacaaaaaactatccgggctcggtggcgggcacctgtagtcctagctactgaggaggctgaggcaggagaatgacgtgaacctgggaggcagagtttgcactgagccgagatcgtgccactgcactccagcctgaacgatagagcgagactccatctcaaaaaaaaaaaaaaaatatctagtctatgatccaaaaagtttcactcctaggtatttacccaagagaaatgagaatatatgtctgcaaaaagacctgtacagtgtgtccatagctgtcttattcatagtagcctcaaaatggacacaactcaagggcccgtcgaaagcagaggcaaatcatggtgtgtccctgcatcgtgaagagaaacaaagggctgatgcaacatgaggacgtctcaaagacaagttgcacttaagaagctatgctaagaaaacaaacacacagaagcctacatcattacatgtatagaatgttcaagaactgatgaaaccagtccgtggtcacaaaagccagaaagtggttgcttctggggaccagaagggaaaggggcataaaggaaccttttgaggtgaatagaagtttctgcatcttggtttggcacacatgccaaaactcaccaggtgagcatttaagatcttgcgtttttattatatgcaaattatatctcaaataacctaaaaaacaatgcttgtgacaggtgtgcccaggtgccatgcatggaggtgaggggccaccacatgccaggaggaggctgggaggcatcctggggaggggaggtcacgttggatcggggtttccaggcgagatttggaaaagcaaggggagggtgagcccagtggagggctaaacctggccgaaagcccagagataagaaagagctcagccttggtttcaagcaccaacggcctaaaaaggaaacccagttatttaacagaatccattctcttttaaggctcagtgtgtatctgagacaggaccatttcccctctccagtgcaagcttcttcatggactttgttcagatttcaattttataatagctttttctattctcctcgtcagtatactttttttttgttccaactgataaattattcttgctacttagttttaaaaacattattcaagagtattgccttattaaaataacttgatgctttctattttttttttctccttaaaacataaaagctacagattctcgttgacactggaagcagtaactttgccgtggcaggaaccccgcactcctacatagacacgtactttgacacagagaggtaagcgctggccccttggctggtgtgctgggccggggcactgcatgatcaacatgcttcaaaatgcaccagagcatgacagccagaaagctgtttcattttaagggggataccaatatgtatgtgtatgtatacacacatgtggacatgtgtatgcatatgtacatgttcattccatccacaaatccacagcaggagtctcctcatggccttcacgcatttacatgagattcattttctaaaaatccaagtcaaacacaactcctttagttatcccaagtcgcagggagcttgtggccctttggtgtttattgcagcagctttagttctgcagtggaggtgggctggagcaggggacgaggtcttgggagtctgtgaggccactctggccgagggtgtgggtttgcttcctcagctgaagggatacatggaaacccacctttgcatagttcagtaggggttacggtgtggttcatggaagccatttctgtgggttggtttgcaacactcatttggaagagtgagttttgtgagcacaaagtattaagggccaagactggggctgcacatgagcaattatggggtggagttgagaaaaaaaagtgtagcctgatggaggtctctggaatagaacaagccttgcccatgcaggcttccgagcagccctgggtggggttgtggggaggcccccagcggcttgtggcagccttcagctctgcaggagcccgtggggtctagagtcaccgccctctgtgaactggaagctgctctaatgctgtgcacgttttgatgtcacaactatttttacgattctgaaatttaaattcaacagacagccaggtaaatttaaattcaacggacagaacaggtaaatttaaattcaacggacagaacaggtaagctgacatgctggtttgttttttagggtcatgaaccttctagaggctcggaactgtcacattaggtttccctactgtaaattcttttcctgacttccctttctcgctttccttatcctcagtgttttgttccgggaaataaaggccagctctagttggggacaaaaggagggggaaagaataactgaagtcttctgaaaatgccaggcaatttaataaagccagatgatttgctgtgtatgaaagaaagcatagaggaaaccctgtatatctatgctacctacaccacatcctgggctccactttggtgccataaatgatggggcctcctgcacgtatggctgcaggtgcttgctggggagagggctgtggtggccagtgctctatgaggcttcagaaaaatatggctggcccctccctcaaggaacctatagcttggtttatggcttcatgtgttggtaagctttcttcattgatattcccggatacaactcctgcctatgatcactatgtgcccagctgttgctataaccacaaacgtgtgtagaagtcgtggtggtgtttctctctgtgtgtgcagcagaggtttggtttacgatggcttatgctgccccgtcccactcagatctgtgattcatccaagtcctcagtccccaaacagccctcacctccaactgttcactctggactgctcatcatggaacaggacttggagttggtccaaacccctcattttgattcctgcggcacaggagttcagagagacaggggacttgcccaagttcaagctttgaggccagcagtccccaaaccttcagccaacacctgctttttataacaagtgctttgtcattccctgaagtaaatgcaaaggtcatatgacttatctacatacacagctcaaagtgccctgacgtcatatggggggaatacaagggaagtaatgtataaccggctaatcagtacctcagtacgtgaacactctggctccgtggtgctggtagaccacgcagtaggcagatgctggaggtgagttaacatcaccatggacatgtacacccagtgtagactgatcaaggcaagctgacttacactcacacaccccaagcagctcagcttgctgtcttagactgttgtgctgctataagagaatacccaaggctggggagtttataaagaaaagaggtttatttggctcatggttctgcaggctgtacaagaagcatggtgccaggctctcaggctgcttccagtcatggtggaaggtgaagcagagccagtgtgcagagatcacatgggagagaggaagcaagggtaggggaaggacgtgccagactttttttcaacaatcgatcagccctccctggagctaacagagtgagatctcagtcattattatgggcaaggcacaaagccattcttgagagatccgacctcactacgcaaacactttccaccaggccccacttcctacactggggatcaaatttcaacatgagaattggaggggacagatatccaaactctatcagttgctgatgtgattttccagaatggacaagaatcttaggaaagttccaagaaaaacagaaagagaatcagcttccctggatttccatagtagcgaatatgcaatgtatactaaacctgtgtagaaaagatggtatgcatatgtgaatgggaggtgcattctgtgctcatatgatccagcagatttcacccatgttgatgcccagagcgactttggaaagtggtgtgggatgggaacaatacttcattttgcatgactgcccttcacattccaggataaccagcatgcttatcaaacacacccccaaagtttccaaaacttcccctaggggacaggaccttccccattgagaaccgcttatctgaatagtccctgatagtcccagccctgtgttgtttccactgctgggctctagtctgtacgacacgttttccacgtttccccctcactggggctcagcacacaggggcagaaccaacacacgtggagcttgcatttcctcgtttagcaattctttcccacttagaataggtttttctctcatcatctgtagatgcaagatacaacagaaagaagcagtaaagcacagtaaagtcaaggttagggtgatgtggatggtgactttccagatttaaagggaaccatgcaagtcaagccctgtggatggctacttttttcatggcagataaatagcagttctgtggcagccgctcatcgccagagtccatcaaggtcaaagtatgcttctcaatccacacatcctttcgctatgcagaggcaattgttgaaaccttcaagggtaaataatactctgcattatcaagactatgtgcaatatttcatcaaccgtagacaacccaccgcatctttctcagctcccttcaactgtgttcagtgtttggttgagctgtggttctctttcaggctaccgtgggacacatctctcttacttacctgctagccctgttttgcattcaagtggcagatggttcctgttttccatcctttgggcttctctagtccatatgcatttgatgaatatgaaaactgggatcatccagaactcatttgatgactaagccttccctcctgctaatctcacaagataattcaggatttcttgccaccattctgaccactcaaggttctgatctgtttcttcttttgtgggtaaataaaaagagaaagaacacaccagtgtctggggaaagcccctcaatggttggtttcaccccattgccacttccaccattcaaattcagtgtaccttccttatttgcgagtactgcagagactgacttattacatataacacatcacgcaccttttgggtgtctaccctggtaccgcctttcttttcaagagaccattcttcaacagaactgtaaggtttcttcttggctgaatcagatgtgacgcatcccacttctgcgtttgaggcgagttctattccttcagctgcatccctgctaccatgcttgctttgcagattaaattcttagattgatattaacttgtttccttttatctgctttttacatgctttattatggttgatatgctttatgattgaaagatatgaatattttctttcaatgtcaattatgtataattaatttgtctaatgctttcgtgtaactttagagctggcctaagttatactttcaaccattgtatttgatgggagccaagagactgtccttttgccttctcaatttttgacaaaggtttcttttctgagctgcagctctctgccctgtgatgtgtctgtatttgcttgtgcttctgatctctcttagttataataaggttctggttgggtttgtccgcctctgattcacgtcctcagtctttggatattcaggtctaatgcttcctgaaacatgttacagtaattggagatttggcgtggggttctttgacaagatctctttgatttatggaatgagatgtcaggctaccattagtcatttgtgagctcgtctttatcagaatccatcttttcatggtggtgaatgttccaatgagttactatagagcaaaaaaagaaaaaaagaaaagaaaagatcatgtattttttaaatgtacatcttttttagccaataaaatctcacctccagctagttggcttgaagagagatccagtatactcatcccttgaccctccacgaatctattcaggagattaagtatatttccattaaaatgtctccttacttctgtactatatccgggttgaagctcacagagcaagagaccaatttattttcctcaactaatgtttgtaagggacttctttaaggaggctaaactggatacagatcaaatggctttccattcaatgaggacagatatttttacctgattattgagatcatttctcaagcatgtccatcatttgcctagtagaaggggacttgctgttttggagcctgtgagcatttaacgttattgaggatgttgatgaaccgccaggctgggcaggctgagctgaccctgaacctcagggggtctcatgcattcaggtctggtgacttcgagaatcacagaagattaagaggggcatccggtcacctgggccaggacagtaagcccacgggtagatttcagaccctgagagccccagggaagtcctgagcagaattctttaggagactcagcattccctgggtcgaatggcttaggagaaccagagctgacccaaggattgaactctagaattctgcacatccaccttctcttttcgtgttctctgcaaccaacagcaggtttcttttgaaataataaaacgttctgtagctcttttcccctcagttcaattgatttcactttttaatcctgcattccctgagcactcttatcagaggcagaacatcttctgaatttggttcaaagtgtttttattactgtgagcaggctttttcctggccacccacatccctgattgattgctgtttctgagcacccagaatggacattgccaaggagaagcccatccaggtttcttgctccatgtatttaattattgtgcagagcaattgagagccaaagcattttagtcgcaagaggtgggacgttagaaaatgaagatgaaggcatgtttttcatttaaagtgctggaaactctacgctaataataacccctagagtcacttatgaatgattcttctctggggttttactcagaggtttagttcaaggaacccagagaatatgaatatgaactgagaattacctttttttttttttttttaacattatctaggactgtgctttctacaaggctagccacaagtcacatgtggctatttaaatttaaatgaatgttaaatagaagttcggtctttcagttgcactataatcgcatttcaagtgttcattagtcacaagcggccagcgtattgggcaggatatttctgtcgtcacaggaggttctgttggacagcgctggtgcagggcagagaggaactctgccgtttagacaccggttgcacaagagcttgaagcgtcaccacctcgccttgacctccttagctgagacaccccacacacacttgctcctttcatggggtggttggactttagaatgagacagctttagattcagtaagagtagctctataggagcattttccagaaaacaaacaaacaaacaaaaacatcctgatgatatgctttgggtgcaaatctcatgttgaaatgtgattcccagtgttggacctggggcctcagtggaggcatttgggtcatggggacagatccctcatgaatggcttgttgctctcatcaaggtgatgagtgagttcttgctccgttagttcacatgagagctggttgtttaaaggagccaggcacctcctcctctctctcttgccccagctctcaccatgtaatgtactgtgtcccccttcgccctccaccttgagtggaagcttcctgaggcctcaccagaagcagatgccagcaacatgcttcatgcacagcctacagaaccatgagccaaaatcatacctcttttccttatgaattattcacccttgggtattcctttatagcaatgcaaacatggcctaacagacttgaattttttttttttttttttgagacagagtctcgctctgttgcccaggctggagtgcagtggcacgatatcggctcactgcaagctccacctcccgggttcatgccattctcctgcctcagcctcccgagtagctgggactacaggcgcccgccaccacacttggctaattttttgtattttcagtagagacggggtttcaccgtgttagccaggatagtctcgatctcctgacctcatgatccacctgcctcgcctcccaaagtgctgggattaccagacttgaattttctaataataactcatagcctgaaaaaaggcagcaaatgattaattataataatagcagctattttgtggcatatctcctgtgttccaagcttttgttctacatgctttacaatattaactcttttaatctgcataattaacttcacgagggatggtattatattatcaccattttttagttgaggaaaccgaggcatagagaaataaataacttggccctgggtcacacagctaataagggattgaactcatatttgaacccaggcagtataactccagctgcctctgctgtctctggaaatgacaccaaaatatccagagtgctccctctgtaaggagaccagcaacctgagcaggaaactagagaagacatgctaaatagatatgcaggctggttcaggttcttactaacactacaaattctacagagttttctatagcctggacagagtgaaactaaacttttcaaaaggaagtcatagcattttagactgtttaggaaagatacaattactctaccagggctgggcaaggtggctcacgcctgtaatcccagcactttgggaggctgaagcaggtggatcacctgagttcaggagtttgagaccagcctgaccaacatagtgaaaccccatctctactaaaaatacaaaaattagctgggcatggtggcatgcgcctgtaatcccagctattagggaggctgaggcagcagaatcgcttgaacccaggaggcggaggttgcagtgagctgagatggcagcattgcactccagccttggtgacatagcgagactccatctcagcaacaacaaacgattactctaccagaccaggtagtatggtttggctgtgaccccactcaaatctcatcttgaattgtagctcccataattaccatgtattgtgggagggacccagtgggagataattgaatcaagggggcggtttttccccatacactgtcttcgtggcagtgaataagttttacgagatctgatggttttataaggggaaatccctttcactggctttcatttctctcttcccttccccatgtaagacatgcctttcaccttccaccatgattgtgaggcctccccagccacgtagaattgtgagcccattaaacttctttctctttataaattacccagtcttaggtatgcctttatcacagtgtaaaaacagactaatacaccaggagttggcaaactctagcccatgagccaaatctgacctgctgcctgttttagtaaataaagttctatcagaacacagccatgcagctatgcaagtttacttacacattgtctgtggctgcttccacattacgtttgagagctgagtagttatcacagagatcccatggcctacaaacctaaaacgtctattatttgtttctttatggaaagaaattgccaacctctgttctagatcctattctccaagcatttcaagataattagtctttgtatatttctgaacttgaggaatgaacccaaattgtcaaaatggactgaataattcagtatttttattgctattcaacataagcgtgttcatctcctcccatgtggcaggcacatctgaatttatattggcactaacacttggcattccgccaatcttcaaataccccatttcaaagacctgactgcatgttacctgggtaatttctggtggatcccttagtgctctaaggaccctctgtggtcacttttctgtttttgtacctgcccattgtcgggagatctgcgcacagaaaacattcactgaatgcctctcttactttatgatcacggtggagtgaaccaagatagtaggcaaatattaaaagccaaccatctttatattctgtaccccattatgaagttagaatcagctgtttcccccaaatccgtttgccagaccttcgtaaaataacatatttctcctgattataaaaataatgcatgcaaacatggagggacctaaccacaagaataggagtcctcccacctccaatcctgccaccccagctggccactgttaatatttgagtgtaataaatagttttgaaggagagtctgtctcattgacgtatttttcttttaactttttctctgcatcatttaaaatttcttagaaaaagaaacatttttcccttggcacataatagcgcatcatatggatatgctgtaatttactgaactgtttccttgttactgagcatttggatggtttccagctgtttgctgttatacataaaacatcacgaccatcctggcacatgaacctctgtctgcttcctggtgtctccttagggtcagattctcagaagtgcagttactgaattaaagatagttaacatttttgatgcttatgagatataccaagaatgagttaatgaataaaaggccagatagggtggctcatgcctgtaatcccagcattttgggaggctaaggtaggaggattacttgagcccaggagtttgagactagctcgggcaatataatgagaccctgtctcggcaaaaaaagaaagaaaaatattagttgggcttgatggtgtgcacctgtagtcccagttactcagtaggcagaggtgggaggatctcctgagcccaggagttcaagctactgtgagccatgattgcgctatggcactccagcctggatgacagagcaagaccttttctttaaaagaaataataaatgaatgaatgaatgaatgaatgaacaaatgatcatgtcatctccaaacttctttactgaccttaagcaagactgcactagttcatgtaatcccacaacaaagacttattaacacgtgttaatgttcacagactgattattaaaacagagtgaaatcaagcctgcaggtgagcaggatcgctttagtatgatctactgggtgatttgatatttagcttagaattgtgattattttcttaggaggagcatggtttgagttcatagacatttgcctagagatgtttcttaggttccttcctatattccagcagttttcaaactcaaatgggcataggaatgaccttatagggtgggactccccagggccatgacacctgctgtcctctctccacagtgctctacccctagagagccccaggtctcactgtcttcattcaggtctcatgcaaacatggttggatccaagagttctctccaaccactgggtcacttgaggtccccttgcctgctttgttccctgggtggctctcgtcccgtaaccaccattcccgcattcattatctctcctcactgcagcataaactgagggggcaggactttcgtctgatcttgtgaatgtcgttctgcgtcagtagctcttacctccagggccacgtgagtgtcaggctctcggtcatgtcacagtgattcatgttctggcatgccattagcgtcactgcccatattttggtgagagtataatcacctttggggcattgggggagaaccttgagaaggacctgtgacatgaaggacctgggcttcagcaggtagggcttggtcattatttgtcacatgagttgtatgtgtgaacctgaactccagctgctgcgggcacaggctggtggagcctccctctgggatgccggcacctacccgtgtcacacagcagcagcacagcagccctgcaaagccggagggccaggcaggtgccagattgggttgtgtccttcaaagggtcgtgtcctacggtggccaaacaaagcacctgacttatagggtttaacttgggtatagtgaaaaattaaactccagccacatgtttacaccagtgcgtcccttccacatgacatggaaaacactgttaccaaaacattagcgattatgtttttgggggaagctgtcactttgttaacattgatgctgttcatgataaagaatggcttacaggcttacagtagactttctgtgtttaggatagctgccttggacacggcaaccttatcttcatggttcgggaacatggatacataagagaatgcaaggggcttagccgggcgcagtggctcacgcctgtaatcctagcactttgggaggccgaggcaggcagatcacaaggtcaagagatcgagaccatcctggccaacatggtgaaaccccgtctctactaaaattacaaaaattagctgggcgtggtgatgtgtgcctgtattcccagctactcaggaggctgaggcaggagaatcgcttgaacccgggaggcggaggttgcagtgagccaagatcccgccactgcactccagcctgggtgacagagcaagactccgtctcaaaaataaataaataaaaataaaataaaataaaatgaatacaatatgcttttcttttctttctccaggtctagcacataccgctccaagggctttgacgtcacagtgaagtacacacaaggaagctggacgggcttcgttggggaagacctcgtcaccatccccaaaggcttcaatacttcttttcttgtcaacattgccactatttttgaatcagagaatttctttttgcctgggattaaatggaatggaatacttggcctagcttatgccacacttgccaaggtaaggctaatccatggatttaaggaaatcaaataacaggatgagattctgaaaatcagtcattaaagggctgacacatgagtcttgggctgttcttggagacagtgagaaccacgtggtggaaacagaccagcattcacacaattatatttccaagcattttttaaattgaaggtaaacagcatgattcttggaaccttcctgtaagacaggcaatagcattaactttttgttttattttcgttttatagtttaaaatgttaacagaatttgaatcatgtagattgtggtgtgtgtttaggagtttttactaaggtgggattaaaagaaaacacatttattaaattcatacgtttgcgtgaagatggagcctgcagacggccctggaatgcaggcagggggtggtgccctccgccaggctgggacgtggcctgttttcctggctctgcaggggacacctccgaggagacacccagcatgggaatatgggcagcctgaaggcatgccctggggagagccagcccttcccagtggtggtgagccccagaggaattgtggaaccctgctcttgccatcaccagagcctccccacatggggaaagacagaattggatgttcaccaaatatttgtacttggggcctacccaaaggaaatatgtctgtatgcaggaggagggaggcaggcaggggaatttccacctggaggcattgccaaaggcaggcgggagtagacgctaggggtgtgtgcagggctcctggagtccacatgggtttgtatgtttattgcggcattattcacaatagcaaagacttggaaccaacccaaatgtccaacaatgatagactggattaagaaaatgtggcacctatacaccatggaatactatgcagccataaaaaatgatgagttcatgtcctttgtagggacatggatgaaattggaaatcatcattctcagtaaactatcacaagaacaacaaaccaaacaccgcatattctcactcataggtgggaattgaacaatgagatcacatggacacaggaaggggaatatcacactctggggactgtggtggggtggggggaggggggagggatagccttgggagatatacctaatgctagatgacgagttagtgggcgcagcgcaccagcatggcacatgtatacatatgtaactaacctgcacaatgtgcacatgtaccctaaaacttaaagtataattaaaaaaaaaaaaaaaaaaaaaaaaagaactgcagaaggagaccagctctcctggccctgtacctgggtaccacgccctggcctcaccttgctcagcgttaggcttggaaccagagctatgtgtggaagggaacagaagtgattgctggagcaataggcccccactgtcccatgaggataatcttcccatcgtggaagaacatttgttccagctcaagtttatgagcagatgggggtggggtggggagggcaagaggaagtttacagcccttggcccctccaaggagacagaatcacaattactgagagcctattaggccctaggctgagaagatacaagataagatgtgggtcactcagtgctcaggactcccctgtgaggcatactttgtaaggtcatattctccccattttctttttctttttacttttttatttttttgagagagagtctcactctatttcccaggctggagtgcagcagtgtaatctcagctcactgcaacctctagctcccgggttcaagtgattctcgcacctcagcctcccaagtagctgggaccacaggcacatgccacaacgcctggctaagttttgtagttttggtagagatgaggtttcactatgttggccaggctggtctcaaactcctgagctcaagtgatccattcacatcagcctctcaaagtgttgggattgtggcatgagccaccgtgcctggccttattccccccattttcaagatgtggggattgaggatcagtgagctgttgcccctttgaaatcaggcatggagcttctcactgtctgcagagccagggctggctcatgaaccttttgtcctctgtatcatagataattgcagacgcatgaaaacttccgttcctaaatacattttcaaaatgctttatctgtatgtgactggaaatgaaagatgtatatgactggttttatgcaaattgttccgaagatgatagagtaaacctaaattgcctggaattaataatatgtaaagattctgtgagaacagaccccttcggggtttgctcagacctcctgactctccgtgcgacattttatcttttcatttatgaaattccaagattactgacaattggcttcccatttccagggtttgaggagacagcagtaggactcataggaagcagaatgtggctgggaacagggcctgcagggtgagctgggcagactgcccacaggggtctctgagacaggtgggctgagcgctctgcagtggtcaggttgtgtggtggcccctggtccattccaggggcttcctgtcaaggctgtgtcaggaacacctactgggcttctaacactatagctgcctgggccccactgctgctgaatcaggttctctcagggttggttgtgggcacctggatgcttttaatccctagagggatcccgaggcacagccctagtgaaggacttgacagaatgattgcagctccttcgctgtgtgcgtgtgccaggtactgctccaagtgctttacaggtattggcccatttaagccccagagcggctccaggcagctgcccttatccctgtttcacagggaaggaagcaaaggaacaagtcactcggctggcaagtggcagagcctgtctcccatcgtgtttgctttgctttaccgcctctcaagaaggtgggtagaacaccagctgggggcacccccaggcccaccctataatcccaagaggtgattttgtctcactggttgacccaaacgcccacaagtgttctgacagagattgcatatggaaatcgtgctagattctgcctcggaattctgcagaagctgagatgaaacaagtaggaggtcaaacacaaatggactacaccaatgggaagatctgtatctattccatggtggagttcccctctcactccctctggaatcacagttttagttctcacggatagtaaataatcattcctgtgaatgaccatgggcacccaggggatgcctatagcgtctgtgctactatagttaattacattttcatcaaaaactaacaactcatggtcaccaactccagtgtctcccagttgtcaaagccaaaatctaaactcaggtctatcactgacttcctacatgaccaccggcacccctggcacaccggcacctcacagctgtttacggaccttcccgcttccctttgagtctctctggagaaatgagggcatcctctgtatgtcttgctggatgtgagggagacacagagcacacgagggcttctgaaatctggccttgggggaataagaagccttttatgcttctggagtatagatttgtgcctttcctgcttctttcctgccagagttcatctggcagagctaagcctcaccccaggctctggggtccgggggatactgtcctcccaggtcagccacctctcatttgcatggtggacagctgcggctgacaggcaaacaaagatgtctgcggccatggcagctcctagagaaactcttctctccttactctcaaatgcctaagattaggatccaccacctgccacggtaacctacttccacggcttctcacaccccctcacaaggcagtcatgatgatagatgtgactgcgtcgaatggcttccagaaatatgatcttatttgtacaacagagccgtgcccaaaggaagaatgccaaccagtgggaagctctgctggggctttctgaattcctagacccaatcacaagctggtgtactgttgaaccatgaaaaaattgagtataaacaccaggaatgtctgtggcgcgtggcgtctacactgggtgacccatgtctacactgtgagtcctaagcgggtgcccctctctgtcgccctcccgcagccatcaagttctctggagaccttcttcgactccctggtgacacaagcaaacatccccaacgttttctccatgcagatgtgtggagccggcttgcccgttgctggatctgggaccaacggaggtagtcttgtgggtatcttttagtcttaaaggggcgaaaaatcacagatggatgggctgtttttttctgttttattaaacacctgagcagaaatattaggcatgtaggtgtgcgtaggtactgtaaaactttcatcctccttgtagtagatctttttagaaatggctaaaattaggcaatcctttatgtcatcctgccatctggaaggatgattctcatcgcttctccgaattccattaaaacttttctttaccgcccttggaagggcactgctttctgtgggtgggggagggacaagtgaggagcggtggggggcgtggtgagtggacctgactgtgggtagggggccaaaggagagttcataaatttggcagggaaacaggggcccttgtagatcctttctctctctctctctctcaacacacacaggcacacacgcaccacagcacaagtgtttgctgctgaaacagaatcaaggccgtcagcactacggaggtgctggagcctgagcttccctccaggggccggcacccagacgtcaaaagtagtaggggacaggaagaatgcactagaagggggtgctgccagtccctttgctgtctgactatgagaggcaggatctgcaccccggtcctcagctactttcatttgctaccatttccaggcagaggacagcataggatttatgaggaaatgttttatgattttgcacaatgaagctttgatcagggaagtgcttgatcttctgttctctgacctccaaggaactaaataattgtcagtcagtgtggttaactgttttattgcatttctttgaaggaaaaatctcaatattgtaaagctaaacttgtatgtactttctttggataagagaaacctccaaagcatcttgattagatgagggcctaataccatctgacctttgcagacgtggacccataaaattccttgttttattttattttattttatttcatttattattattttttttagatggagtctcgctctgtcgcccaggctggagtgcagtgacgcgatctcagctcactgcagcctccgcctccctgttcaagcgattctcctgcctcagcctcctgagaagctgggactacaggtgcgcgccaccttgcccggctaatttttgtatttttagtagagatggggtttcaccatgctagccaggccgttctcgaactcctgacttcatgatccgcccacctcagcctcccaaagtgctgggattacaagcgtgagccaccgcgcctggctccttgtttattttttaagcattgatatttgtttcatgacattgtcacgaagtagaagccctgattgcagtgaagtttctctttacaagtgcatgcttctctgtgtaacctgttgatatgtctgtgtattttttctcttatacctgtaaatatttcctgtcccaggtcttgggtggaattgaaccaagtttgtataaaggagacatctggtatacccctattaaggaagagtggtactaccagatagaaattctgaaattggaaattggaggccaaagccttaatctggactgcagagaggtatttatgctatggtctctgttgtgtctttctgtgtatgtctgggtcccttaaatatgccagctggaacccgtagatgccaatagaaggtacattacctcgtaagataaaggctcattacatgaaaagatgcagggccttgctgtacagtaagttgaaatcaattaattgtcctccctccccaccccaaatattgcatcctcccaaccacttatcttcatagggcaaaattaccattaaatggtgagtgaagaggactatctgagctacacctttcaccattcattcatcttggattgatggtccctaagctcagtttaagaggttgaaataaacagatttttaatcagtgtaggacagagaaggacgaaaattaagcaaaatgaaaccgaaaagatcatcagcttttatcctccattcacagctagcctggcccccagagtacccaattctccctaaaaaacggtcatgctgtatagatgtgtgtggcttggtagtgctaaagtggccacatacagagctctgacaccaaacctcaggaccatgttcatgccttctcactgagttctggcttgttcgtgacacattatgacattatgattatgatgacttgtgagagcctcagtcttctatagcacttttagaatgctttataaaaaccatggggatgtcattatattctaacctgttagcacttctgttcgtattacccatcacatcccaacatcaattctcatatatgcaggtacctcttgtcacgcgcgtccatgtaaggagaccacaaaacaggctttgtttgagcaacaaggtttttatttcacctgggtgcaggtgggctgagtctgaaaagagagtcagtgaagggagacaggggtgggtccactttataagatttgggtaggtagtggaaaattacaatcaaagggggttgttctctggctggccagggtgggggtcacaaggtgctcagtgggagagcctttgagccaggatgagccagaaggaatttcacaaggtaatgtcatcagttaaggcagggactggccattttcacttcttttgtggtggaatgtcatcagttaaggcaggaaccggccattttcacttcttttgtgattcttcacttgcttcaggccatctggacgtataggtgcaggtcacagtcacaggggataagatggcaatggcatagcttgggctcagaggcctgacacctctgagaaactaaagattataaaaatgatggtcgcttctattgcaaatctgtgtttattgtcaagaggcacttatttgtcaattaagaacccagtggtagaatcgaatgtccgaatgtaaaacaaaatacaaaacctctgtgtgtgtgtgtgtgtgagtgtgtgtgtatgtgtgtgtgtgtgtattagagaggaaaagcctgtatttggaggtgtgattcttagattctaggttctttcctgcccaccccatatgcacccaccccacaaaagaacaaacaacaaatcccaggacatcttagcgcaacatttcagtttgcatattttacatatttacttttcttacatattaaaaaactgaaaattttatgaacacgctaagttagattttaaattaagtttgtttttacactgaaaataatttaatatttgtgaagaatactaatacattggtatatttcattttcttaaaattctgaacccctcttcccttatttccttttgacccgattggtgtattggtcatgtgactcatggatttgccttaaggcaggaggatcaggtcacccaggactcattccatccctgggtagacttgcctatgcagctgtgcccgtagtggttggggtggctcatctggtgttggccactggtgtccattctcctccctctgccacatgaagaacattgcaggtgaggacagggctggcagcgcctgtgtgtgtctcagtctatgatgcactgtggccctggttctgttcccagtgcaaatatgggatgtctgttgaaaaattgtccatccttctcttcgttagtgaggtcatagagaattgatttgtgtacagtttgtacaaatggcttttaatatatttcagcctcaaaagacaaataggtcttccctctgccctggggcaggagtgcaggtcctcaatgaaggaacttgggcacctctgagtaaggaaagagctgtgccttgggagggctattgatttgctaatttgggccgtgtcccctccctttcctgggtccatttccttgtctctgaagtgagcgtgttgggttggaagacccctggttccccagttctgagaacatgaatgaactacacagtccatgatgactggtgtggctgcctggatttgtgtgtaacagacagatggtgatggcggctagagccacgtggggcggggagcgccactgtcactcacgcacctttccctttctctcccggttcaagtataacgcagacaaggccatcgtggacagtggcaccacgctgctgcgcctgccccagaaggtgtttgatgcggtggtggaagctgtggcccgcgcatctctggtgagtcctcgggacactcacgggtccccgagttgctgagttacagtcacctgctgaggagcagcactgcgtgttctgagcatctctgaactattgcgccatgtatttccaattttcatattgtgtatttgtatattttatatgtaatagtataggtgtaatatgtaaatatattttatatgtatttaaaatctttatattttgaagggttttgtttcaactattacttgttaatttcacagtccctttctttgatgttagcaaatagtaccttcatgaacctcagaggacttggatctgaatgtgcaatgccctctagtatttcaaataatagttcagttggtatagtatttttttaatctgcaaaaaacaatacttgctaatatagctatgttagagtaaacaataaatcgagaataaatttatagcctttgaaacaaaacaaaccaaaaattttactcctttttggctttcatccctgcactggtatcttaacttctgtttgtataaaagaataccattttttcacagaagacaaagaacaatcagccaatctaataattattttatggccatgctctgaaatacaattaaaattatgattgtggacaatatgccttttcgggacctggctgatggtatttctggtgtgaccccaactttccagtcagttcagggcaataaacattggatacaggacagctttggggatgaaatagaattaaatttagtgtagtttttgccacttttagctggatgcctggcgaggggttttgtgccctctgagagcctccgtcttctcaactgaggggtggttgtgagttttgggtcaaatgcttggtgtttagtagatgcttggagcttccatgaaacatgcaaccacggcgttgctgctatttgttcagatgcgagaggaacatgacttttggctgcctgagtgttctcatagcatctgggccttccttgtgagatcgtcagaaagtgtttcctgcacaaagcctgtactgcggccctggcgtggggctgattgtcccgctactctgctgtgatggctgaattcaaagagtggccgataggagcacgtatggtgggtgccttgttaacagctcatagcagaaacgtgacaagcgggagagggctttgggttgtcctgaacttcaaacacctgtaactgctgcgggaagagcggcacgtggatgaaacggacacagagggggaataggcaggaaaggacgcgggctcttttcgaagcagcaggtctcaaggcggccagccactggcgcagctgcagctgaagccacggcagagtctccatccttcccactatctgctgaatcagagaaagtggcaggcaacatttttagtgccttaaatttagaacgcttgctcaaaatcagaccctacttaaaataaggagcgataccctcatttcttaaatagtaaaaatgccctcagcagaattaacgggagtatcttccaacttcatatcctgaatggaaaagtctgtccaccatcccgaggacgtgtttgaagcgcagtgtgaaaatccagcacgtcgtggaccggccagacccctgtgccgtgagaggcggggcggcggggccgtggggcgctcgcactcccgagctcatcgtggcatgcgctgagccgaaaaccacgaggtagagggaatgagatcacaacatttgtttgcgttgtctaaaattatcctctgatttcattcggtgcctgcgtcaggagggagaaacatgggaaggttgtttgtcttgggcagggaaagcatcacaagggcgcgttgtgtgtctggcttaccgtctctggaccaaagctgtgtttgtttttcttatctaccagttccagtaagccaaacctcttggcgtgggtttccttctggttaaggggagggctggcttcagagagtgaaagacaataaaaacgtggagctctgtcccctggcatggattgttcagatgggattctagaaattaagggtttggagttctgtatttagaaatgaacctggagcggggagtgttgtacaaggtgcagcccatgcagaggcaccgagacctgggctcgttccgaccctgccgcagtgcccgcttggctcaggcccagcgcctctctacggaggaaatccagacgcaaaataatacccgcttgaaaatggcttctaactttaacactctgtgatctgagggtcgaaactggctcccaaggacacgtggcttcacccccagggaggctgccagacttttggttaaggaccatggctctggggacagtaagtcccacatccgaatctgaggtgagctccccaggccagtcacttggccccttggaacctccttgtccacctgccgttggagctggtcatggcactatcatctgagctctgtaccccgtgtcccgctgcagacctggccaccgaaactcttccccgaatccagcaaaatgaccatcccacctcttctgagcatgtctgagaaggggctctccctgtgatgcacatcttcagtagacttcgctttttcacaaagcaaagatgcattaatgccagcattagaaatttcacaaatcaatcacaaatggtctgagtggagaacatgggatggatgaaccaaccacagggtgctttctccccagctgcacgccctggtgaggagggcaggtgtctgcagtgcgcgtggttacgtggcacgtaccacccctgatattcagtgcgtggacatcggcagatgcatacaggggcacccgcatgttttttcagttgtggtcttggcagcgttctgtcccattttcctgtcttctgttctaactatccttttggtttctataagactcttctccctcctccttggactctccctgtccctgtgcccctcctcgtggagcctcttcttctggcctgagccacctgttcttgctgcacaccctcctacgtgatcccatccttagcctcatcgatacctcctgctcacctgtcagtgcctctggagtgtgtgtctagcccaggcccatcccctggaactcaggggactcaggactagtgggcatgtacacttggcctcaggggactcaggattagtgagccccacatgtacacttggcctcagtggactcaggactagtgagccccacatgtacacttggcctcaggggactcaggattagtgagcccccacatgtacacttggcctcaggggactcaggattagtgagccccacatgtacacttggcctcaggggactcaggactagtgagccccacatgtacacttggcctcaggggactcagaactagtgagccccacatgtacacttggcttcaggggactcaggattagtgagccccacatgtacacttggacacgtgaaccacatcgatgtgctgcagagctcagccctctgcagatgaaatgtggtcatggcattccttcacagtggcacccctcgttccctccccacctcatctcccattcttgtctgtcttcagcacctgccatgtccagccggcagattccaccgcagcatcttctgcagcacccccgaccacacacctccccagcgcctgcttggccctccagcccagctcccgcctttcttccttggggaagctccctggacagacaccccctcctcccagccatggctttttcctgctctgccccacgcgggaccctgccctggatgtgctacaatagacacatcagatacagtccttcctcagcagccggcagacccagggtggactgctcggggcctgcctgtgaggtcacacaggtgtcgttaacttgccatctcagcaactagtgaatatgggcagatgctaccttccttccggttccctggtgagaggtactggtggatgtcctgtgttgccggccaccttttgtccctggatgccatttatttttttccacaaatatttcccaggtctcttctgtgtgcaaggtattagggctgcagcgggggccaggccacagatctctgtcctgagaagacttggattctagtgcaggagactgaagtgtatcacaccaatcagtgtaaattgttaactgccacaaggagaaaggccaggaaggagtggggcatggtggtgttctagtgttacaagaagaagccagggagggcttcctggatgaagtggcatctgacctgggatctggaggaggagaaaaatgtcccaaaagagcagagagcccaccctaggctctgcaccaggaggcaacttgctgggcttatggaattcagagggcaagtgataagcagaaagtccttgggggccacaattaggatttctgtcttctaaagggcctctgccctctgctgtgtgaccttgggcaagttacttcacctctagtgctttggttgcctcatctgtaaagtggtgaggataatgctatcacactggttgagaattgaagtaattattgctgcaaagggcttataagggtgtctaatactagtactagtaggtacttcatgtgtcttgacaattttaatcattattattttgtcatcaccgtcactcttccaggggactaatgtccctgctgttctgtccaaattaaacattgtttatccctgtgggcatctggcgaggtggctaggaaagcctggagctgtttcctgttgacgtgccagactagtcatggtttctgatgtgatcttgttttgtctagattccagaattctctgatggtttctggactgggtcccagctggcgtgctggacgaattcggaaacaccttggtcttacttccctaaaatctccatctacctgagagacgagaactccagcaggtcattccgtatcacaatcctgcctcaggtatgaacttggatttgtgctttgctctttttatcatgcaaaagagaaagcactccatgcatgacacgtgtattagatgtcacacctgcattagatctctatcaccacaataatgctgcaaaagacagccacacatattactgctcctgagtccaggcagggcggtgtcccttggccgggctcactcacgtgtctctactcagctggtggttggctgggtcccggttggcctccacccaggctggtgtaggatggtctcactcacatatctggtggcgaggtggatggaggaacagagccatgcgtttctctccattcagtgtctgagtcacatgtggtaacagggacctgggagagagaaaagaaccacacaggggctcctgaagtgtcagcccagaactagccactatctcttccatgatgctgcccaaacaagcccaaggctagcccagattccgaggatgagggaaaagatgcccctcgcactgggaggagccatggagccgcattgccaagggtgtggctacaaggaaaagggaagacctggagacatttttgtcacacctaccacatcacccttatacatttttcctgtttacgtataaagaataaaagtgggctgggtgcggtggctcacgcctgtaatcccagcactttgggaggccaaggcaggcaaatcacctgaggtcaggagtttgagaccagcctggccaacatggcaaaaccccgtctctgctaaaaatacaaaaattagccgggcgtgatggtgcatgcctgtaatcccagctaccccggaggctgaggcaggagaattgcttgaacctgggaggcggaggttgcagtgagccgagatcacaccactgcactgcagcctggcgacagagtgagactctgtctcagaaaaaaaacaaaaaacaaaaaagaaaagaaaaagaaagaaaaagaaaaactagattgcccaaggtgaagacatcatttttttcctatactcccagtacccactgactccctctttatcctacacgtctaatgaaatggaccacgtctgtcttcctcagtcccatttctcacctcttcctcctcccctccgttactgagcccttgcgcgtgtggctctcaccagcacttctgtaacctgcagagtgctgctgtgctcctgagcccccaccctctcttctttttgaaactgttgtcagatcagtcttcctaaaccaccactttcacccgagcctcccctgctatgagtaagcagtgcgtccccatgatttaaatgctcagggctcgctcctggcatcgctgtccatggcctcccaccagacccctcctagttcctcagtgttttcactgaaccccaaccctctgctgggtggccactgaccctcaaggcctcttgcctgcaactgtctcctaacctttgttccaccaacccccctgcctgaaatgccctcccttccttactccgcccatatatccagattcttcccatcctttaagactcaactcaaacaacccagcttttgttgaaaccatgccgagcagaataacccatttgtgaggttgcacctcccactcagcacgcatattttctggtctgctcatctggcatggaatcttatctttagggtacgttttatgctgttgcctttttcatttgacttctgttttcttaacttctatttcgttttcaattaattataaattccttgaaggtgagagctgtgggggtaaaagattgtccttccttccccaacgccaccaggccgtggagggaaagtacatcagaactgtttgtggaatggacacatcaatatgtctttgttgcaattgatgaatttgagataaagggaattggactgcagggacaaggaaggaggcgtaatttcaggagaaaaaaagtaaatggtactactgccttttcccattttcatctttacgttgtggggatgtgctttccagaaaaggagagatcttggggaaaggattgaaagctccaggagaaattcaggccgacaggagataccacgctctcaggagaggcttgagtaacacgctcagcactgcccttccctcacaccgtaactttgagcaaagcatttagccctgcctgtgtctctttaactataaaggagaaacaataatacctaccaaagacattttcagaagaatgcagtatccttggatgaatggcactgcactgaatgatattacaatgctatgttttcagcatctttaaatcatctttaaaatcatgtgctcttggccgggcgcagtggctcatgcctgtaatcccagcactttgggaggctgaggagggtgaatcacgaggtcaggagttcgagaccagcctggacaacacagtgaaacccagtctctactaaaaatataaaaatattagctgggcttggtggcgggcacctgtaatcccagctacctgggaggctaaggcaggagagtcgcttgaacctgggaggcagaggttgcagtgagctgagatcgtggcactgcactccagcctggacgacagtgtgagactccatctcaaaaaaaaaaaaaaaaaatcacgtgctcttgatgattacattttggctagtagagcggcaaaatgtggacattatttcatcagtgtggtgtgtaataatgtcaaaacccagcttgaggacccaggtgtgcactgctgaataaatgtcaggcaccaaggactcgtaagaagcaggaggagaaggcaggcattagggggaaacctcagtccaggtgggtcacagccgggaaggcttgcttggcttcctcaatagcttttaggacccagcactgggcaagctcaggagcagaatgagaggggtttgggagcatttcatctcatttgcacatctctgcataagaattcattattgctttcacttataatggtagatattttttggttgtctttgacatgttcagattttttatttttaaaaatccactttgcctgctgttttcctgatttcttactcagcatcacattccacttgctttccattccctttctgggaggggactccagtaggaagctgggaaagatcacctggtgagaccccacacgctccatgtttcccagcagaaaggctctgcccagcagcctttctaacaccaggggaaaccgccagggttcttgtcctcagagttttaggatggggccctacctgggacctctcaaacatgagccctaataagtgggcaaacgattgctcctgcagaaaagagtcaattcgaaagcaattactttaaactttgtctatacccaacactattttccaaaagcccatgggctgaatcctatgtggcctgttaaaaaacagcagctggcagcccacaggggagctctaaggtttcttcacagcttctactttatccctacttgacctgctcttcagtgtggtcacatggcagcccctccctgctggtctcctctcagtcttttctgctccctccaaaatcacccctcacagtccctcaaaccccctacagccagaaggcccaggactctgtgtattcgtgtgtctgcctgtttcatccaagtctttcttcctgtctctgccctttaaggctaatcattactcacaggaaggttcgttttcttactcattttgcactcttgcttttctccaaacaggggcattttgtcatactcagctgctgtactctctaattgcctgcatttgaattatttgctatccaaaagccaagaaattgttactgctggtaggatattgatttgctcactgattgtgttcaggtttgacccatttccccacatactcttggctccagggatatcaatggccgactcatcttcatttaacactgcacagcacctgtgggaactggccctcctgaatagcagaactgctgacccacagatgctgtcttctctctgatgttgattacttcttcctcttttcactgaggaaattgtcctgcctccgtcaggctgcctacttttaaaactctgtctgcccgaggggcgcatgatgagctctgggccagctaggagccattgcagtggatcccaagagacgaggacagtgaggacttggcctgagttgggcgagggagtgatttgattccgcttcggtttcacaggaaggctcacaagggtctggttacagtctccatgcaggctaagagagaaaaggactggcccagcactatagggcctgagtaactgggtgaatcatgaatttactgagacagagaactgtgggagaggtctgatttggggggaacagccagcattcaggttttacaggttacacgggaaatgccgattgagaggtgggcaggcaggcggacacaagcatgtggcaatggtggcccaggtctgggctggagaggaggagttgggagtctcaggctagatcacggggtgacctagggccatggggtggggccagatgggtcacccaaggagggaagattgagaggaggccagagcctgagagtgctccgatgcttgcaggggaggaagatgaaggaaatccaatacagtgcctgagaaggagcagccagggagttagggagaagaatgcagccctcttagagtccaagtgaagaaagcgtccacacggacgaagtgattagtggtcagcagtacccatagagggtgtctgtgggggcacttcccgccctatggttactgcctggttccccctagattggaagcctcgagggagcagggactgtgtgtcattcaccgttgtagtgctggtgcagagagcagcacctgagccatgtgaagtcctcagcagataactgctgggcagatagccagatggacatgaggactaaactctgactttttttttaattctcttgcccaaaattcctacctaaggggcctggggagtccgctctacacaccataaagtttcaccagaagggttttatttaaccttgtataacatggcctgctttccagcctagctctggcataacatcacataacaaataaggaaagaaatcaaaatattttaaccccaaatatatttccttttcatattttgaaattgccctgcagagttgtctcttgtgagaaaaatctacattgtatagagaatccccttttccctttttttattctttccagatctagaagataatcgactaagagtcaggcaaccttttttttttgtttgtttgttttgtttttttttgtttaatacatatatactttaagttctggggtacatgtgcagaatgtgcaggtttgttacatagttatacaggtggcatggtgatttgttgcgcccatcaacccgtcacctgcattaggtatttctcctaatgttatccctcccctagccctctaccccctgacaggtcctggtgtgtgatgttcctctccgtatgtccatgtgttcttattgttcaactcccacttatgagtgagaacatgtggtgtttggttttctgttcttgtgatagtttgctgagaatgatggttttcagctttatccatgtccctgcaaaggacataaactcatccttttttatggctgcatagtattccatggtatatatgaaggcacccttttaaattctgtaagacacatttcacaacctcttttcttcacagcctgctaactaaaagcttcctctgcacaataaaactttggtctcttaatccaaacatttcctttccattgatcccaggttagataaacttaaccaattatcaaccagaaaatttttaatttacctctagcctggaagccccactttgacttgtcctgcctttctgaaccaaaccaatggacatcttaaaagtatttgattgatgtctcatgtctctcaaaattgtataaaaccaggctgtgccctaaccaccttgggcacatgttctccggacctcctgaggctgtctcatgggccatggtcactcatacttggctcagaataaatctcttcaaaatattttacagagtttgactcttttcatcagcaaacagttggacagacgtcttctgggtgtgtgcacctgtgtgtaactccaggtggtgcatgtgggtcacctgtgctgtcactgatcaataatattgatcaccatgcttttgatcttctctcctcctggatggcagggtgagatcatctttcttctcccgtgactccccccagcgcctgggagggtcctgagcatgcgtgtgacctcagcaattttgtgatactgcctgatttgtgctttttcttgtttgtttgctctctcctctccgacaaacagctttacattcagcccatgatgggggccggcctgaattatgaatgttaccgattcggcatttccccatccacaaatgcgctggtgatcggtgccacggtgatggagggcttctacgtcatcttcgacagagcccagaagagggtgggcttcgcagcgagcccctgtgcaggtgagcgattctggcatcgaacagggatccccgacaagagtcctttatgtaaatgtgctgacttggaagcaattcttgatggcaactcaattaccattgaattgtttcactcattcctatcaccagtgatcaaaatcttctcaataaaatgggtcatggggttgctgagagaattaaatgacatcatccatgtgaaacttcagtgcttggcacatgggaaatgcttactgagtgtgagtcctgatagtcactaggagtaaaaatatgccgtgaaaccttggagttgaattgcaatttttcgacagtttaagcaaaatgagtaaggaagaaatttcacacataagccgtgtacatttatttgtccataaagctgtcctcattttgaaataggaaatgaacacctatcgttgcgatttcttgaaatcctaatataatgagaccaaggagcccctgtttctcgtgggattcctttgaaagatgtgtgagggcagcccgcagcatgactctgcagtctagctggagggttggcaggtcttcagagaaaccaggatagcatgagaaagtcaagaggatagataaaccccataagcttgaaaatgtcttcagacttcacggtttgcttgaaacggagtgctcacaccacacacggcttaatgggaggattaggtatttctgactgagagtccaagcctgcaaggcagaggcaaatcacagaagtgggcatgagattgaattgccggagacaagtggaggaagagcctgaatcagaaaagtggtcaggagaacggcagcctttcaaaacaagatgtcaagagactgaaaaaaaaatggtacattgggtttgaagtcaggagcagaatggaattccaaagttgtgctggtgatatgtgaaaggagagaaaaattaagtgtgaggtcaaaaaagaatcgatgacaatgaggtagaatagaacaaaatttgggaatcgatagggaaatacaagatcaccatgtggttgaaggaaagggggttttgtaggaatttgatggatatgagacgctgttggaggacaggtgagattgctgggccatcctggaagcctcaactcagaccttcactctgatctcaacccaggtgaagagctgccaggatgaggtacacaggcaaaatgccaagtgatcacagctgaattattccaggagggagagatttcagttactattttttaatacctaaaacatggtcttaaaacaggactcctggtaaataaagcagataaaggatgcttcattagctgactttagcagagtggcctttcagaaaagtaaagtaacaatttagagaacagaaatattaaaaggaaagattgcagtggactattaggccaattcatattctgtataaataaaatcatccaacccagtgtatgtatatgacacatcatgacatgtcttcataaatatctgtgccgacgtatttcgctttgcatttgtgagcagacttggaacccttcccattgtcatgttttttatctttgctatgtgtaaatgtttaccttatgtatgtgcaataactcttttagcctgttcagttatcattgagtgagacctttctctgtggcagcaggtgggactgaaatatcactgaatttcctaactgtgactgttttacttctttttaaccaagagaatctaagaacttaggcaattttgtccacaatttctgttctctcattaaatatcattaaagtagaggctactatggcaacagctgttagagggtccacttaatactgcagaatctaataaccatttgttttctcagtgaattactgttggaaatggtgtaatattaggcgtctctaggcagggcaacttttttttccctgaatttcactgtgagttatttgctagatgctcttatatacagcttttgttccttttttaaaaatgtacttgagcttttggtatttaaatgttagattttaccagccatgggaaaatacactgatatatgtcccctcttccatgtggattgtttcgccattaaagtaattactttcctcagggctgcaattaacggcccagacagtgctcgatagaaccctaataaatggaatagctatgctgcctttcttttttttttttaagtatttatttttcattataaaatgtttaagtaacaaaaaaaccttaagttacagaaaatcatatactatgtgtgcatttatggactatctagatttaatattttgtcatattttctttaaaaatttgtcttagaaataaaaaaccaagtatagctaaagtttcaccccaccccctcccccagcactactcattatcctgagattagtgtatattcttatctgaattactatacatttataattttactagatgggcatgtgcaccttctattaattatctattgctatgtaacaacttacccccaaatgtcacaactctctatcaccttctgcagtttctttctttcttttgttttcttttttttctttttttattttattttttatttttagacagggtcttgctctgtcactcaggctagagtagagtgcagtggcatgatcagggctcactttagcccaacctccctggttcaggtgatcctctgacctcaacctcctgagtagctgggactacaggtgtgcaccactgccctagataattttttgtattttctctagagggggttttgccatgttgcccaggctggtctccacctcccaggctcaagtgattgaccccccggccccgccgtggcctcccaaagtgctaggtttacaagcatatgccaccacacccagcctgtctttgttttgttttgtttttaaaagacagggtctcactctcttaccaggcttgagtgcagtggcatgatgttggctcagtgcagccttcacctcccaggctcaagcaatcctcccacctcagcctcccaagtacctgggactatagcatgtgtcaccatgcccagaaaatttttggtattttgtgtagagatggggttttgctgcgttgcccaggctggtcttgaacccctgggctcaagcgatcctcccaccttggtgttccaaagtgctgggattacaggcttgagccaccatgtctggccatcttgtggagtttcttagggccaggagttgatgaggcacttagccgggtgtctctggcccaccattgctcatgaggctgcagctgtctgaagtccattgtaggagctggttccaagctcactgttgtggtggcaggagccctgcttccctcaccatttggacctcactccaggactgcctgatgtcctctggtcagccctgaacatgtgatccgagagagcatgacggggcacccaggatagaaaccccaggttttcatcacctaatcttggaagcagcatgttctcactgctgccccactccgttggtcgcacagaatgaccctgatatgatgtgggaggggacgacgcaggtaaatgccaggagtcatccgcagtcatcttggaaacatcctaccgtatacttatcacaaaacctaggttggttgatttgtttgtttggtttatttttttttatttttaaatttataggaatgctgtggtagtgtgtatcctttgtcaactcgactttattgtttgacattacattttatagattttccatattgatatgagtcctaggttatttgttttgactgcatactatctcactttatgaatgtacccagattacccatttttatcttaattaacatttggattatttctgtattggcaattataaaccgtactgcagtgaacgtctttgtgtagatgaatgagatcacctaggaatggaatttctaaatgatttattatgcaactcttcagtgttattggctacagtcaaatttgtctttaaagtagctgaaacatcagcattatatgagaatttccattccctaaaagcatgactgtatttgttttgtctttgtgttttgctaatccatgtatgtgcaatagtgtcacattttagttgattactttcaagatcatacaactttggatatgtttttgggatgtttgagcttcttctctgagggtgaatttttctactaatatagtgtgcacatttttctacccatactttttactgatagacatgagttccttatatttctgaggtattagtttttctgagttatactatctagtctccctgactttttactttgttttggtgccttatatttatatatatctttaatttagtgaaatcaaatttaccagtatttctctcatgaactatgccctgtgccttatttaagaaatacttctttaatccaagaaaatagggatttttttcttctaaagatactgtatacttttttcttattttcttccaaaatgtgaattaggaaattaatttatataaggacgttccattttctcagcatccttattgaatatataatgttttcccctctgatttttccaatttttttatttaaaaaatttatatacagaaaagactaaaaataataccatgctgttctgcatgtcaaccatctagatttagtaacttttaacattttgccatataccagtatgtgtatataggtgagtatgtagtttttgctgagccatttgcaaataagttgcagatatcatgactttcacccctaaatatttcattatgcattctaaaagtaaggacattctcctatataaccacaataccataatcacacctaaaaaattaataatatttgctaaatatcatgactatgtagaccacatgcatatttccccaggtgtccccagaatgttttcattagctgttttgctttttattttgttttggaaggccagttctcttgtagaatgtatcatattcagttttatctattccctaatgatataccgcattgattttgcatcatatttccttgaacttaagtctagaggcttaattagacttgagttaaatgtttttttgcaaggtatctaatgaattttaatagcatctttgtcatgtaccaagtccccatttatgcctgagcctacttctgagcattctgttccattccactggtcaagttgtctatccctcggctaagctatatagttttatttatttttttttagttataggacaatatctggcagggacttgacccttcttattcttcctcagagttctcttggctacttttgcccttttattcaacttgtcgagatccctgaaaaaccctgttgggatttctattagaactgcattgaacttacagaattaacttgagaagaaaccaaatctttaccatatcaagtttcccctatgaatgtaccagatcttttcatttatttaggtcttcttttatgtcctactccagtattttgtaattttgtccaaaaagattcacacatagacttattcctatgtacctcttagttcttaccacaaatgagattattttacattgcatttcttgtgagttgttgggaatatgggtatgcaatttttatatattatatattaatcttctatccagccacattgctaagttctcctttctagaaatggtttttagagtcgtttgaattttctatcaaaacagccatataatctgcaaatcatatattttaaatcacttgtagttgttatatcttttatttatattttttgtgatgccctctgagacaatattgaatacaaatggtgataatggacttttttgtcttttttcttactttaaagaaaatatttctcatttcgtaccatggagcattatgcataggataggtttgtggaatttccttctcagtcctaaatttagggatttccagtttctgaaaagtattcagtatgaatggaaaagctttttgacaatttccacattaaacatatgcctactctataatcaacattcaacattaagcatatgcctactctagaatccagcagttgtcactcttaggtgtatgcaaaggagaaatgagtatgtaagtgtgctgagacttaaccagaaggttcataacagctttacacataaaataacttaagtaatacatactttagtagttacataaatacataaaaccatcacttttatcaaaatagaaacatcccaaaagtcaaccaaaggaaaacagatgaacaattgttgacttgccattcagtggaacactgccagcaattttctttctgctgaagagtgtgcttttggatgtcttttataaaagactgtgaaaggtaaattttattttgcctcaattccgaatcacaatttagctatacatggaattctagattgcctgtgttcccttagtgttttgaagattcagtttcattgtcctctggctgtgatgattgctgaagaaaagaccctagttggtcttaactgttgtacctttaagggtaatctgttgcttctccttagttaccggtaagactgcttttattttaaatttccagtgttctgaatagtgttctgaagtttcaccatgatgtgtctaggtatagggtattttcccatcgtgctataccctttacactctctgaatctgacaactcatgacttttgtcatcaatcttagagaattcctagctgttaactcttccactattgcctcatgcacattctttctagtctcttcttctggatctctcatttcaagtaatgagatttctcattatttatttcaggtcccttgacccttcatttatgttttcctttctatctttgctgcattctgtgtaatttcttcagatacattttatattggcctaattctctgttcagctatgttcaatctactatttaacatattcattgagtcttttaaaatacttttactttttattatttttattgtttttggattctttaattgtctttggtttgggggtcttttttttttcttttgagtttttcatttcgatgactatatttttcatttctagaaattgtatctcatacttttccaaatataccatagccgggcacagtggctcatacctgtaatcccagaactttaggaggccaaggcaggaggatcgcttgagtccagaagttcaagaccagcctgggcaactgtgttagttcattcccatgctgctataaagacatactgggactgggtaattgattaagaaaagaggtttaattggctcatggttctgcaggttatacagacttctgcttctcgggaggcctcaggaaacttacaattgtggtagaagaagaaagggaagcaggcacagtcttcacgtggccagagcaagggagagagagagagaggggaaggtgctccacactttcagacaaccatatcttgtgagaactctatcatgagacaatactggggggtggtagtaaaccattagaaaccacccccatgatccagtcacctcccaccaggccccatctccaacacttgggatcccaattcaacatgagatttggatggggacacagtgccaaaccatatcaacaacaaagtaataccctgtccacaaaaaatcaaaaggttagccaagcatggtggagcatacctatggttccagctacacaagaggctgaggcaggaagatcacttgaggccaggaggtcaaggctgcagagagccatgatcatgtcactgcactccagcctgggagacagagcaagactctgactctaaataaataaataaatatgccagttaacttttctatagtgttgtgtaaaattttattgtgacttggattttctttatcttctttttagtttttatttaatttaaaaggctaggtaatatttagaaggtacgatatagcacatagtcccactccctcagaggtaatcatactaatgcctaaagtccttccttttttttttttttcaagcctcatagtttattatatgggtgcacctaatttatttaaccagttcattattgataggcatttaggttgttttaagtcttttgttgttacaaataacactgcagtgaacatcatttatatatatcatttgcatatatgaaagtatacatctaggttaaattattagaattgctgagttaaaaggtatacatatttgtaattttaatgaatatcacttcgttaccttccatagagcttatattcatcgatacctggccataccatctcttgtaatgtagatgataacctacttggaaattttggtcatctgacaggtgaaaaatgatgatctcggtgtagttttaatttgtgtcactttctatgagtgagattgagtttcttttcaatgactaaggtcactgtttgtccttttctatgaactacccactcatatctttgcccattgttttctgttggattctttttttgtattaatttgtaggaactctttatgtaatggagtaattaaccatatgcttggaggaaaaagaacctataatttctgtctcaattgtacatttttaaaactttgcttatgacatgttttagtgtaaaaaatgtttactttgtatatttaaatagtttgatattttgctttaagggtcttgggactactgttaccttttaaatggctttcctcactaaaagtgttttgtgacttattcaagtactttcatgtttgatttaacttggcatagaatgtgtggattaaacttctttcctctaggataactacccccattgttataacatttatcaaataacttacttttttttactttaaatcctaaaattactgcataccaaattctagtaaatatttgggagatgtatatctgtttctggattttctgtactattccattgatatatcttatagtattagttccttttcattattcttttttcagaatttccaactcttctttcttaatttttcttttcttttatgaacttttgagccagcttgtttagttttaaaaaaattgtactttaatgggtttttagtcactttaaacacagctatggtataatcttgtgcacgttgttctatttttccatcaccgatggggagttcatcttgtttttgtgtctgctggctgctctctcatagtagacttttttctcgtttgctttgcaattttttgttgtgagcttatatttagagggagcacattttttcttccaagagagtgcagtgtgccttgggctgtaaagtgttgctgtaaagcaattttgcatatgtttctgctgagtgtccgcagaccatgagaatcttgggatttgcataccaggttgtgcgaatttagatgccagccacgtttgaggtggaggtttaggggctccatttctcatgggagagtttcttgccctcctcccccaacctcttagcccctgagctgagccaggcttctgttggcagaatttcccggctcctttcaccaatgggcaaggtttgcacaggcatcttgaccccagtgcctacttccttggtgcccagggtcaagtctctcacccctcctggtcgtgggaaccccagccttagggcccatttctggttgaggaatgtctcttacttctggactcagctatagagttaaaaagttatattttatcctcattcctctttgttgcagcaggaagaggttctaccttcacaccagtcactgtttgaggaccccacatctttggaagctgcccttctctcacagtgtttgtgtgtgtgtgtgtgtgtgtgtgtgtgtgtgtgttcatggtcatttgtgtttgtccgatgacacttagcctaagggttggggtggggggagcagtgagtgggagctccttgattagaatctcctgggacactttttcaaaatacacctggtcaacatcctcacgcccttttccagcgaaggcacagcaggatggcggtgggtgggaaggtgatgggtattttggaaaaagttccccagatgcttctcttatgcttcccctgcctctcctcagcccactcccacccctgctgagaatcattactgcagtcagattggctggaggtcagggtgtgttatggctcgggccagcgtctcatatctgacatggatactagggactggagcactttcaaccacctctgtgttgctgggccaagtgtcctacggctacgaaaataatagagtgttaaaattgacaactctctgttattttagtgtatccaaagcttatgaaataccacccatctctttttatagattgagacatttagcacccaagagctgtatagatctcagcttgtacaacttgaggcacatgatggattatggcagccatttgactgtgaatttttcttgctgcaggttgaaagtggatcatctggtacatgctcatgtttaaaaatagcagagttagctgttaagagaagagtttcagagatactcctctgccatctacttagactacaatcaaaagataccaaagccaggggaccccaaaggtgtagatcaggctgctctgtttcctcattttacagaagagaacactgagggccccagattttccgtagctttcacatggttgcagaaaaaaaatctggctctgggtccagaacccctatcctgaaactccagaatgtttttctaagtaaaccatgcctactcagaaagcatctcagtaccagataatcagtgtggcgggacagttctcattattttgtatgctatagggaaaaagacctgaccattataatttttatccttggtaaaattacagatcttccacaggcactcattatcaaccagatcctgacctttcagagaaaatacacaattaaaattgtaactcgagacattgatgaaagagttaaaagtaacagtttagtaacagcggacacttacgtagcaccgatcttagcccaggactgtactaagtgcttaacatctattaacttgattgttcttacaagactgactggtaggggctgttattaccttcattttatagatgacaaaactggggggcaaagaagttaagtaacttggcccagatcacacagcttgtatgtgggagctaggattggaaccccagaagtctggccccaggttcatgctctcacccactgcatacaatggcctctcataaatcaatccagtataaaacattagaatctgctttaaaaccatagaattagtagcgtaagtaataaatgcagagaccatgcagtgaatggcattcctggaaaaagcccccagaaggaattttaaatcagctttcgtctaatcttgagcagctagttagcaaatatgagaatacagttgttcccagataatgctttatgtctgaccatcttaaactggcgctgtttttcaaaaacttaaaaacaaaatccatgactcttttaattataaaagtgatacatgtctacttgggaggctgaggtggtgggaggatggcttgagtttgaggctgcagtatgctactatcatgcctataaatagccgctgcattccagcttgggcaacatacccaggccctatctcaaaaaaataaaaagtaatacatctacattgaagaaaattaattttattgggtttttttgcatttttattatacacagcacacacagcacatatgaaaaaatgggtatgaactcaggcattcaactggaagaacagtactaaatcaatgtccatgtagtcagcgtgactgaggttggtttgttttttcttttttcttctcttctcttctcttttctttttttttgagacggagctttgctctttttgcccaggcttgattgcaatggcgtgatctcagtttactgcaatctctgcctcccgggttcaagggattctcctgcctcagcctcccaagtagctgggattacaggcgtgtgccaccacgcctggctaattttgtatttttagtagagatggggtttctccatgttggtcaagctggtcttcaactcctgacctcaggttatctacctgcctcggcctcccaaagtgctgggattacaggcatgagccaccgagcctggcctcggtttttcttttctaatctcaatgagattataacagatgtgctattctttgacatgctttgactatcttattcttttgactttttgaaacagctttgttgggatataattggtgtaaaataaacagttcatgttgaaaggatacagtttgataagtgttatatgtgtgcgcaccttgaaaccatcaccacaaacaaggtagtgatcatatgcactgagctgttttccctgcctcccaggtcctgtggaccccatgccattcccaggaaaccactgacgtgccttctgtcactgtagactagtttgtatttgttagaattttatataaatgaaatcatacagtatgtattccattttgtctgactgctttcacacaataaaattattttgaggttcatctataatgtttcatgttcaaaagttcatttttattgcagatcaattaggcattatagtttctttatccccatacacctgttgatgaacttttggattgttgccaagttttgggttttttggcaattataaataaagctgctatcaacaatagcatgcaagtccttggacatatattttgttttttatttctcctggataaacacctaggagtagaatcgttgagttacataacatgtatgttttactacttaaaaagctgccaaactcattttcaaagttggctttatcatgtcacattcctgccaacagtgtatgaaagttccagttgttaaacatcctcaccaacatttggtatggtcagtattttcattttaataggtattaatatttagcggtctcatcgtggctttaatttgcatttccctaatgactaataatcctgaatatcttttcatgtacttttttgccattcatgcatctttttaaatgaaatgtcttttcaaatgttcttgcccatttttgtatagggttgtttgttttctcattgagtcctcagagttatttatatatgaagaatacaagtcctttatcagaaatttggctttcaaatatttttgccaagtctttttagtctgttaatattttctattaaagaggagcagttcttacttaattttgataaaatccattttttttccttttacaaattgtgcttttgggtactatagctaagaaatttttcgcctaaccccaggacacaaagattttatatatatataatggagatggggtcttgctctgtcaccagactagagtacagtagcgtgagcatagttcattgcagcctccatctcctggcctcaagtgatcctcctaccaccgtcgcctaaagtgctgggattataggcatgagccaccaccacacctggccacaaatgtgttatttagtttccaaataattagggatttttccagaagctttctgttattctaatataacctcagtgtgggcagggaatatagtttttatgaattgaatcttttgaaatttattgaaacttatttcattgtccagaatatagtctatcacagtaaatatttcttgtgctcttgaaaacaatgtatattctgctattatgggtggattagtttataatagttagatcaagttagttaatagtgttgtttaggtattctatatcataacttattttctgtctacttgctctattattgagaaacggatattggaatctctgactatatttgtggatttgtctatttctctttgcattttcatcaatcttgttttatgtattttgaaacactgttattaggtaaaaaaacattaggatttttatgtcctatttatgaaggaaacagtttatcattatgaaactactatatttacttctagtaatttttttgatctgtatctattctgtctaataatatagccactctggatttcttttgataagcattaatatgatagtttttttccatctgtttagttttaacattttgagtcttaacattaaaagtgagtttcctgtagggagaatatacttggatcttgctttttatctaatttagcagtctctgttttttagttgtgatgtttaggccagagatccacaaacaacagtctataggctgaatccagcatgtggcttgtttctgtatggcctgtgaggtaagaatagtttttacatttttaaagggttgaaaaaatcagaaagaagctaacctaaaaagcttaacatatttactatctggccctttacggaaaaagtttgccaaatgctggtttagactatttatatttaatgtatgattgatatgtctgtgtttaaccagtaacacaacaaagaaaactatttttctttttgtctcatttgttacattttttcccttttttccttttttgctgccttcttttggattattttctatttctttatatctccttggctagtttattagctataactctatatcgtgaaattttagtggttgctttagaatatgtagtgtaaattttttaactgaccacagtctaccacttcatatagtctaagagccttccaacaatagacttccatttcttgccttcggtcctttgtgctattgtcatccattttacctatgcctatattataagccacccagcacattgttataatttttgatttaattgattatctttgtaaatatttaaaattaaaagtaaagattttataactactatatacttcccgcttctggtgttcatcattcttttgtgtagattcaagtttccttctgatgtcctttttcttctgcttgaagaactttctgtagtgaaaatctgtgatgtgttctctcagcttgtgtatgactgaaaatatttttatttcttcttcatttttaagatatttttgctgggtatagagttctcggttgacagggcttcttctacccccagtactttaaagatgttactctattgtcttctagtttgcattgcttccaacatgaaatcatctgtaatccttattattattcatttgtacataatatttcttttttctctctccttgcttttaggaaattttctctttatcactggttttcagcagtgcgctattataatctatgtcatgtttcttgtgtttggggtcctttgggcttcttgggtctgtgggtttatagtttcataaaatttggaaaatttttggttttttcaaatattttttgcctcacaatcccttcttccttttgagtactctgattacatgatttagcagcttgatattgtccacagtttactgatgttctctctctctcttttttttcagttttttctctgtgcttcatttctattgttttggttttttttaaattcattagtctgtttttctgcagtgtataatctgctcttacaaccatcccgtatatttttcatctcacatattataatttttatcactaaaaatttgatttagatctttaatgtcttccgtgtctctatttaacatgtttaacattttctctggcatcctgagtagaatacagttataataaatatcttgatatcctgcctgctaattctatcatctgtgccatttcttactaagttccaattgattgattttgctccctattatgaactgtgttttcctgcttctttgcataattagtgctgtagaatcaatgtttatgtcctgccaaaattcttatgttgaaacctatcgggggaacctgcccccgataattcaacattatttcacgtaggttcttttctatttccttaagtgtcagccggtctgagaaataaagggaaagagtacaaaagagagaaattttaaagctgggtgtccagggaagacatcacatgtcggcaggttcgtgatgccccctgagctgcaaaaccagcaagtttttattagtgattttcaaaggggagggagtgtacgaatagggtgtgggtcacagagatcacatacttcacaaggtaataaaatattacaaggcaaatggaggcagggcaagatcacaggaccagggcgaaatcaaaattgctaatgaagctttgggcacgcattgtcattgataacatcttatcaggagacagggtttgagagcagacaactggtctgaccaaaatttattaggcggaaatttccttgtcctgataggcctgggagcgctatgggagaccggggcttatttcatcccttatcggcaaccgtaaaagacagacattgccagagcagccatttcagggacctacccctaggaacacattctttttctcagggctgttcctgctgagaaaaataattcagcgatatttctcctatttgcttttgaaagaagagaaatatggctctgttccgcccggctctcaggcagccagacctaatggttatctcctttgttccctgaacattgctgttagcctgttcttttctcaaggtgcccagatttcatattgtttaaacaatttgtgcagttaacacaatcatcacagggtcctgaggtggcatacattctcagcttaggaagatgatgggattaagagattaaagtaaagacagcataggaaatcacaagagtattgattggggaagtgataaatgtccatgaaatcttcacaatttatgttcagagattgcagtaaagacaggcgtaagaaattataaaagtactaatttaaggaactaataaatgtctgaaatcttcacaatttatgttcttctgccatggctttggccagtccctccgttcggggtccctgacttcccgcaacagaaacctaatctccaaggtgatgatatttggagttggggcctttggaaggtgattaggtcacgagggcagagcttttctttgtaaatggaattactgcccattattaaagacagtccaagagagctcccttgtctcttccaccatgtaaagacacagcaagaagatcattatctacaaaccaggaaatgggagtatagattgactgcagggtgcatccctctgttctcggtgttggcaggctcttgttcattgcctttctttttcagtgcacttaggaaagccatattatgacagaatccacattagcaagaaaatgcagtcactttgcaaagtaatcaagcctgttttcctctgattttaaaaccattcttttcaggtcattatcgcattgttattttgactttttctttcctcagtcaaaaagggtattatttggcagctctgaagatcttgaggctttagttacagaaaaatcaaattcttagcagtgttattttctggtgccaaaatattcatttctgtgattaaatataggaaaaatgggtaatgaggcctatttcttttccgtattgcaagtaaagcttaagatcccatattcctgaaaggggcagagaagcctagtgtaggcaaaggaagtctacagataatccacaaaccggctttaagaaatcatctcaacttccttcttggtttgaagttattcaagagtctctagcagaagtcaccgggtgaattttaactgtttctctttgtcaccagtgatgtcatgaattaggtgttgcattcacttactgctcctggctgttgatgagacctaggataagagtggggcagggagggtctctcaagccagcctgacccccggaggtctcacaacccactaagactatgagtcaggttgatatgaggtccctatctgttgtagaatccatggtagggagtgaactcaggttgactccactggggaaaattccccatgacgtaggcaggtccagctgagctttctgcggtaaattctccttctctttctcctcttttttcatctccactgaggaagcacaacccacacagctgtcatgaccaggtgctgacctgcactctcacctgtgtagtaccgcagtgtcgctggcattccatgaagcacagggtgcttccatatgtgccctgctgcagttcccctccacacctaggctcggtacccacacaccttaaaacatgccgtcgttccagtttgcagggactggacccccaaaggcacgctgagccgtgaccccactcagtgcttcctgagctgtctaagccactgggacctcagtggactttaactgtggtttaataaaccaaggggttctgtctgtgtccaatgtgagaggtggaccgctcatttcacagctgtggattttccctttctgtctccccagaaattgcaggtgctgcagtgtctgaaatttccgggcctttctcaacagaggatgtagccagcaactgtgtccccgctcagtctttgagcgagcccattttgtggattgtgtcctatgcgctcatgagcgtctgtggagccatcctccttgtcttaatcgtcctgctgctgctgccgttccggtgtcagcgtcgcccccgtgaccctgaggtcgtcaatgatgagtcctctctggtcagacatcgctggaaatgaatagccaggcctgacctcaagcaaccatgaactcagctattaagaaaatcacatttccagggcagcagccgggatcgatggtggcgctttctcctgtgcccacccgtcttcaatctctgttctgctcccagatgccttctagattcactgtcttttgattcttgattttcaagctttcaaatcctccctacttccaagaaaaataattaaaaaaaaaacttcattctaaaccaaaacagagtggattgggctgcaggctctatggggttcgttatgccaaagtgtctacatgtgccaccaacataaaacaaaaccaagccttggctcgttctcttctctcttcaatctctggaaaaataagtacatatagttgataacccctcttagcttacaggaagctttttgtattaattgcctttgaggttattttccgccagacctcaacctgggtcaaagtggtacaggaaggcttgcagtatgatggcaggagaatcagcctggggcctggggatgtaaccaagctgtacccttgagacctggaaccagagccacaggccccttttgtgggtttctctgtgctctgaatgggagccagaattcactaggaggtcatcaaccgatggtcctcacaagcctcttctgaagatggaaggccttttgcccgttgaggtagaggggaaggaaatctcctcttttgtacccaatacttatgttgtattgttggtgcgaaagtaaaaacactacctcttttgagactttgcccagggtcctgtgcctggatgggggtgcaggcagccttgaccacggctgttcccctcacccaaaagaattatcatcccaacagccaagacccaacaggtgctgaactgtgcatcaaccaggaagagttctatccccaagctggccactatcacatatgcttactcttgcttaaaattaataaatcatgttttgatgagaaaaaactattctatttcactagcttagttgtctctttttccaaatcttctctggaagtaggttggctattaccctgttgggaaacagggaaatggcctgatgcccctatttctgaccagctgtcagggaaggaagatgcaagatgtgcagaagacacaaggtaacgtctacttatccccgtgcttcgaaaccgtgtgtttccctttgcagaactggttagcctcaagcatacccatccaatcagcttaaattgttcagcagttgacctctgtgcttcttcctttgggggtgtttaatctttggtaacagttgtgcagtggtagccttatttcggggggcagtccctactttctgtcacttatcgaggcctttgccaaagaaaagtggaagccgtttccttgacatagccttatatgacctgatgtcattaggagaagagttaaaagacagtatcccctctctcctgcttgtgtgccaagttcagtgttccctttgcatttttttggggtgggttggctatattacagaattccaccaaaagtgctaagtgtcccctcctgcagaagtatcgtttgtattcacagtaggctacgtgtggatgtttcagccatctgctctgctccctgggtccccgggtcaccaccatactgagaaatataggactctgccaaagagacgtggaggccacgtcggcttgtcatggtgtcctggaagactctccagcagccagaagaaccttctgtgctgttttcactagagaagatttgagttgcagcctcttggaaagaacatgacggcacggaacgggaggagggggctcttgtatcagggcccgttgtcacatccgctctcagcttgttgaaaactcataatctcagaatgcatttcacacggagagatgtctggaagtccaattctcatcccattggctttttccgtggttgctgttttgtgggccgctttgcacaggagtgaagccaacacccctagattgtgccttcacccttgctgtgaaaaattcaaagccctgaaataagaggagggaatcgcagacatgccctgattagttttcctgcttatttcttcatacaggcatcttctgttccgttgtattgtgttaggtttcagaggcggggagcttcctcctgcagcagatgaacaggcatagttcttaaaatacaggaaagtaacaagtgaggtttccaggtagagtaggtgaatgaagtttgccgtcatgctctgtatttcatatcagatttctttatcttttcatatcgcatgtcattggatgtgacattttgatgaaaatactgaaactacaaaagcataacttcgcaacaagaatgagatagacaattgaatgtgggacatttttctggcatgtcttgctgctgagaatcggacttccagtcaaaaccctgttagtgacacccacctcctccagttatgcaaattgatgcttagcttggcaagctttcaaggaggtttgcttggaacaggaaaggaattaacaaccctttgagggtgtcatttttaccttgtaatacactgtggaaaattctggaagacggtccttgcctgaaaaggtgcaacttagcattaggttgttatcagaaaccttgtcaagtctgatgggaaatgaatagatgctgctttatttccttgataacttctttggaagtctgaaataaatcctgccttcagtaactgaaaccatttattaaaaatagcaagaaacaagatggggaccaattctatttttattcttgggaatttgaaagagccacaagtgattggtgtccgatctcccagcatatactgtacactattttgtatttctcctgaaccaaaaccaagtacttagcactcaagaaacagatgccctgtgtgtgaccgaggggagtgtttttccacaacaggttccacttctgaacacttggaaggaccttgcctgattcatggtgaaacacagaggttttggttggagataaatttggggtcagttactgttcaaaattgtgaaagtagttcccaggaagacagcattagtgactccgcagtgctttgggtaatagattttgaaaagcaattgtgagttggggattccatcatttcatttaagaggtgaagagggatttaattatttaatacgccgggtgcaaacttgttaaattcctctttccctgtccctgcttggtggagctgccacgtgtggttcagttctaagttctggactagtgccactcgatatcattgggaataaatcgttgttcaacagtctgttccacaaacaacagtaattgaatttcacagactttatcctgattagtggaaatcaaataatggagtggaatccccatgtgttttctcttgcacaaacttattagacttgattagaaaactgtttggaggaaaaacttgccagtaagttttttggttgttgttttgttttttttgaaaaacgacgcaacaccataaagtgtaaaattaggggttctggccaagagaggtactagatttttttaatgccgagaaaagtccatgccacagaagttattgtgtatgtctctagggagctttaagaatttcacgtttgaactttacagctgtttaccaattaaatggcaagctggaaaaatacattttgagaggggtagaaagaataagaatataattaaaagtatgctaacaaaataagcagtacatatttttttagaaaatgcagtttaggccaggcacggtagctcgtgcctgtaatcccagcactttgggaggccgaggcaggtggatcacctgaggtcaggagtttgagaccagcctggacaacatggtgaaaccccgtctctactaaaaatacaaaaaattagccaacgatggtgatgcctgtctgtaatcccagctactctggaggctgaggcaggagaatcgcttgaaccggggaggcagaggttgtagtgagccaagattgcgccactgcactccagcctgggcaacagagcaagactccgtctcaaaaaaggaaagaaaatgcagtttcattccagccatccttagatttcttttccccttaaagtggctgaatccattggagatgtgatttattttgcagatccaccaattccaaacttcaggaatattcaagcgggagtcatgtgtaagtgacagctttgacaaagagagactgtggctgggtggcccgggtgttgcccacgcggagcaaggattggttcattcaacggatggagagtacaggatggctgggacctgggaagttccagaatctgaaaagagggcagggcaagaaggagccagaagagaggtcccacccctcagttggcagtggggcacggaggtccgcatcagccaagaacgtccccaggatgccgtgggcacctcatttcaccccacgtttttggcacagtctactttttaggtattttgtaaaggaacttctcaggattgattatttgccagaggaacaattaggccaagagaaacttgcttgacagccatgtgtaaaacacgtctgtcctaatcaaactagagatgcctcaaggcccacgcaggacacaggcaggttcaaggtcatgcacctggaaatttgtaggggagggtcaagcaactgaggccaaagggggccggtaaagtggcttctggggtctgagcatctggaaggctcctggcagcagttacctgacagtgtcgttgaggggcacggcagctgggccctcaccgtttccgccagctctgctgagccagcccagcccatgcattccgaacatccgacagcttctttctccagaatgtcttctgtcagagacttccaggaaaggagctccctcctgtctcactgctgtcagcgtgggagccctgctccccaggctccacgtccccggaaggtccatcttgtcctggagcacacccagccccattcagggtcagtgcaggagggaacagggaatctgcatttcagtaagctccccaggtgaggctgcagagcagaaaccacggctttcagacgtgagcaggctccctgggctcttggtgtcaccctgttagccacatctgcggaatgtggaaggcagaacatagccacgctgcttagtgctgccagcgaacctcaggttgcatcagtggctggaatctatcacagctgttggggatacgtaactcccagcaataaatccagtattttcttccctgccctgagcttcctctgggtttcttatcagcagctattacacacagatgtccagtgcttctaaactaaattgtactgtgtaacttttacatcacacttgtgtgcttaaaaagcacaccgtgggtagtgactgggccaagagacatcacaaagcttcctgataaatttgaatccagccacggcaagagcgacgtgcgggtacctggtccctgatgcttgggtgccccgttgagcctcgggtacttcttggacactattgtgagagcagccatcctggtgtctctgccagcatcttggggaacgctgtgatggtaaaatatctgtctctcctctgggaatcagggcagccctgagaagtgagcagttccctttacagatggataattgtttgtgtaagaccaaccagataaagtccaaactgtgtagaacacacgtgtgcctcacacatagccatctgagtaaaatattttttccaatgtagatttataattagaaatgacagatttataatatagacttcagtaagttgggcacagctgtcactttcgtggtatcaataaaaggctagaaaccttgggtgtccttggcaacctagcctttgacattgatgtttttccataggattttcttcatttgggttggaataaaaatgcatttttattcacaaggcacagacagataagaatatcataagcagggaagtgtctccaaaggtcaggacatatgtttttctgttgagtgctatatgtggaggtcattgcaagttccctgatatgagtatggtttcgcttgctacattgtgcctattaaagtaaaattttacacaagcctcgcatttctaagattagtgttcctgaatgaaatgttaagaaaacattaaaagattatctctttttaagatggaggaaaaaaagtgaacaaagctaattaatctatcatgaaaattgcacaaaataacatttcttaacaaatttaatacaattttgtgttctttgttgctagtggtataaaacgagatttttttccctcatttttctcattgtagatgtcatctctcacatttatatcagtgaggtttgaaattctgtgtagcagttactcagcacatatgagagggcagcgaatgaatgagatttgtcatgtgctaataaaagctgaatttttgtaatctaaaatgatgtattttctactattgctgttaatttgcattgttaaaaattcttaaagtttaatatgttatgttcagtcattgaaagcgaccactcatttttttcttaaagttgatgccttttctgctgtgctagagtcagtattttgcttctggcaggagagctgcaaactgtgtatcctcaaacagatgcaaaaagtagtgctttgcaaaacgtttgttttctgtttatctcagattaacatcctttaatacaagtttcttaagtgtaacttgtatttctgaaaatgcttaaaattattttatatttccctttgggaatttttctctatttccagcacgctgatttgatttaaaaatgtaataagaccaagagttggagtaaagggatattcattccatgttaaaagtggcttcatagctactgacaaatgtctgaactattgtcgtgcccttcaaaactggagttttctaaaataatcttatttttatacttgtatgttccagcaatttaagatatataccattgaaagggaaataaaacatttttgtttatttgaataaataatactcccaacctgttgcttttggaatgttttgtaaatacttctcttgggtcacatgtctggcggtccattacgtccactccttcattgtgggttcctggaaaatgtcaaggataaaatggagtggaagggagggttcaggctcaatcattaagatgcaaaacatgctgaaggtggggagggtaaagtgctttagagtctggaaaccctacaggtggaaagaaaacacctgcagagaagaaactcagtaagcacatttcagcggtcttaaggatgggacagatggcttagcttggtcctggggactgagggtgaccaggttggcaatgcctgtgcggtcactcccatgatcaccctgcagggagatggcattctaccatttcacagacgagaaaccatctctgagtcacctgcccagaaaaacacagctaaaaagtggagaggaacccagctctgttcccctccaacagcccagctctttctctgcactacactctggtccatccgccatcctgaaccacactctcagagcctaatgcatcacttgtgccagaagaatccagtctagtggtcagtctctagagaagggtgtgcaccaatatgggcacagcagaagctcttagtgaatgaaatgaagatcatccatgagccatgatctagctgctatgccaatcctttaaatatacgctgctttcaatgactagacactttttgtctgacaatatccaaatgaggagaaaagaaggaatctccaaccattaggaggtaaagtgatagttactggagaaacagagtagagtatctgctttctagtaagaaggagatgatttatcctatttcgccatccctaagctggaggggacataacggatgggattttcacgagtctgtcactaggtggtggtgttgtaaagcgttgtggtatacataacgtttgtgcctctttccccattccgtgtagctttcacaaagcagctttttatcaagtatgggtatgtaagtagactacatcccagagctttttcattctgtgctttatagaatctgaaaaataggccagctagaggggtactcaatcttagaggcaaccgccaaatacacatttccagccctggcctctacctgggtttttagacttgtatctccaagttccttctggacgtgtctgcttggccatcactgggaaggaaactgaggcacagaggtgctataaagtctccaggttcttctggaaatgacagccagattcaaaacaccagtgtgtctggttaccaggcacaagctcaatcattatgccattgcctttttaaggttaaagatttaaaattacatatgctaaaatcaaaatgctacgaggaaaaaatattggggaaaatatttgtaacaaatataagggcagaagctgacatttatcgaacagcaaattctggccacgcatcctgccatttcattctcagaacaacccacaacgaggtgcacgtggtactaaaaacattttaaaacccaaggtctgaagacggagctgctcccaaggacaggctcagggaaatcaggaggtccagggaggggagaatctcaccccacaggatgagatgccacaggccaaaggcttaagagtcatctcagtaaaaaatgtaaaaacaaaaagacctactgtcttcagcatacacagattgtacgaaataagccaagtgtattattttctgtatttgatgctgtgatagctggagccctgttgaccctgaaaggactgcctctctcagggttggctaattctaagagaaagtcaacgactcccctggcagcctgccttttagatggaaacccccgatccagagcgcacacccatccacctcctctctggagctctcacactcaggccatatccacctgccctcatcaccccagagccaggtaccagacaactaggcacaatttccctgcccaaagccactgaaattattctaactagccaaagctaagcctgcttaccctgcctcttcccttctttcctacagaaaccacagtaaagcctcctgttccgtcttgccccatccttcggcctcctgactacccctgtgctttgctgcgtggccctcagtggcagctgtgccttctgtttttaggcatctatgaatacaaagagcttctttctttatgacagtcttttgtgtgtctgtgtgccttattacacctcattaaaacaaatcccagatacccttcaaacaccaagaatagaagagtgttagagtccagtagaaaaacatgcaagggctgtcaaccaacagctggccaaagtgggaatacaaatggccgagaaactgagaagtgttcaatcttattaatgtatgcataatatgtaagtaattacagatagaatgaacaaagcttttaattattaatagatgtccaagaggtcacccatcttctgctttgctgatggaaagtgtaaatcaaaacaatcatttcaaagagccctaaaaaatagccaagtcatctttacatcaatactttctttagaaatctctcctaaagagatagaaatatggacaaaatgggatagggtatagagcaaaaaaagcaatttgctgaatatgccaatatttcattgatttttaaagggaaatatcatatatggatgtgagagtatagaatttaagagtgtagtaagtacatgaaattcacactaatctattaccctcaaattaggactcatacataaaggagatggcttaaggatgtttaaattaattttattttgtattcaagtaatacgttgtaatggtttattttatgtgtcaacttgaatgaggcatagggtgccaggatatttggtcaattattattctagatgtgtatattaactcaggccaccataacaaatgctataggctgggtggcttaaaaaaacagaattttattttctctaatgtccttgaggctggaaagtccaacatcaagattcagtaggctcctggtgagggatctcttccaggcttgcaggcagctgccttcttcctgtgtccccacatagcctttccttggtgtgtgaacatggagatctctctgttgctctttcttttctcatagggttgccaatcatattggattaggatctcatccttatgacctcatttaaccttaattacttcctaaatgccctatctcttatgcagtgacattggggtgagggctaggatttttgggggcacacaattcagctcatagcagtgtgtctgtgagggtatttttggatgagattaacatttaaactggtagaatgagtaaagaagattgccttaaggcaggtgggcctcatccaatcacttgaaagcctaaatagaatttaaaacacctgatcattttacaagcccaaactcctcctgcttgattgctttcacctgggacatgagccttctaccttcagactcagactgaaactccagctcttcttgggtctgtagcctgccagcttttggactgtaacttacaccatttgttctcctgggtctccagcttacaaactgcagatctttggatttcttagcctccataatcatgtaagccaattctttttagtcaatctctctagagaatgatatagatagatagatagatagatagatagataaataaatgatagatagatattctgtttcatcttatatatgttctgtttctgtttctctggagaaccctaactaatgcatacagttagtcattattaaacattaaatagtttcaagaagcttatcacgaggtgtctactgcctcacttctccccacctcaaggtcctactgtgtagtggtagttcctcctccaccaaatcttctgtttgccttgatggttgcttgcatatttccaaattgtatattcatgctctgtttgttatctggtcagccaatagccttgattccattgatttagtaattggcaatctgagcattttctaaattcctacatagattgggcccattgccagactctcctgatcccatctatgtgtctgtttttgcatctgtgcctgcagtttttgttactattgtttattaatgtgatctttaatgtgtagctggccagtctcccccagttaatcatcttacgtgatattatcacaaatgtgttcatctagatatcctttagaaatactgaacaactttctttaaattctccttttgagatttgttttggagtttcactaaatttataaatgaatttagagaaaatttacttcttcacaatactgagccttctaattcaaaagaaaggtatacttccatgtttaagtcattatatgtccctcggtagagtttattttatgtagctccatgcctatttcttgataccttaattctcaaggatgtgggatgtcctgttgtcatgaatggggggcctctttacctattaggcacatactagctgtgtgaccttagcaaattacttaacctctttctgcttcaatttctcagctgcgatatgggacgagcagtagtactacatcacagtgttggtatactaattagctgagctaattttgtaaagtacttggtatagtgtttgtcacagacgcactgcatgtgatggttaatttaaaaaaaaatagattaaaatttgcaaattctttttccagtttgttgtatcttttgactttgcctgtgtttggttttttgttttggcctttgaaaaaaagtgcatacatatatacattcaaatatgctaaacatgttttaataaggataatggatttgggtccactggaaagggcttcccaactccaagtttctaaagaaaccctttcctgttttcttttagaatatttatgatttgatttttaacactttaatctgtttggaatgtatgctcaggcaagatgtgaggtatgattttacccagttgttgaatggtttgccctgttgttccaacattattctttaaataattcatcctttccattggtttgacatgaaactttatcacacacttaatcgttgtgtgtgtttgggcttcttttttgactttatttttccacttacacttctcttcctcttgtctgtccaagcacttgccagcactaggctgtattatagtttaaaaattaatactagccatcatggctgcttcattcacattacccttctatttcaaaatttccatggatatttttattttttcatatgagcatttaaatcagctgttatacactcccctaacaaatatttattgtaattttattgggatcacatacgtttataatttaacttagggagacttgacacctttctgatgttgaattatcctgtctaagaaggggaagtgtgtttccatttgttagtttttccctttttgttccttaagagcattttaaagtttccttgattgctatcttgccaatttcttattaaatgtatttgtaggtattgatctttttggttgttaatgcaaatgaggccttttcttccactaaatctcctaactggttgttgtttgtgaatacgaaaactggtgatttctatgtattaattcttactgtgtttcatagtaaattattttgtttgagatttttcaggtattttggagtgtccaggtatacaattgtatcatatgcaaatacccatagtatttcttcattctttctaattttagacctctgttttctttctcctatctaattacattgtccggtacctgtagcatagtgtttaatagtaatgggcattttaaaaattttgttcctagctttttaaactggtactagtggctgagagatatataacttattatgttgaggaaatagccatttatttctatttgattgagaattttattaaaagttttacaattttattagatgtctttcatcatctatggaagacatctgatttattgaatagatttaagaacatgttgaattatattactagacatcctaatattgaatcatgtgcatttctagaataacttctgtttggtcatgatatcttttaatgtgcttaagattatgctttatttagcatttttctaactgtaattgcaaatttagttggtctgtagttttctttttctgtcagtgttgtatgtcaagtgtcactgtttgcttcatagaaataatttggatgtttttccttttttctaggctctagatatggcattatgtactctttaaaaatgtggtagaattcccttcagacactctctggtcctggtgttattttgagaggcagtgccttgatgagtttctctgtcttctacggaaataatctgttcagattttttatctctactgtatcagttttgataaattatattttcttataaaattattcatctaagtttccaaattaagcagaacagtgttatgattttttaaatttctcctgcttttatagttgttttccctgatttcctatattgtatgtttttatgcacacacacactctctctctctctcaaattcttagctcatgacttatctattttattaagaatttttttcctaaaggtttaattcattagttctactatttaatgctcttattactttgtttttgtttttattacttttgccttgtttagttttgattgataattcacttgttttcattctgttacactggcataagcatttatggcaataaatattcctctacgcactgatgtaattgtttttcaaatattctgatatgtctttattttctaaaaagtctacatttcttctgtttattttctctttcaccaaagaggagtttaagagacatttttgaaattttttagtggaaggtgctttttgttttctggtaatttccactcgagttgccctgtgattataagtgtggtctataacagtggtctccaacctttttggcaccggggaccggtttagtggaagacagtttttccacgggtgggaggtgggggatagttttgagaagaaactgttccacctccgatcatcaggcattagttaagatactcataaggagcctgtaatctagatccctcgcctgcgcggttcacaacaggattgctctcctatgagaatctaatgccgcctccgctgatctggcaggaggcggagctcaggcggtaatgttccctcgctcacctcctgctgttaggaactaggctgctcacctccttctgtgcagcctggttcctaatagaccacagaccggtaccagtccacggcccggggttggggaaacaggtccaggatgtggaacttgagattttctttatggctcagcacagaccagtttgcatgttctatgggtgcttgaaaagaaggtgcattctttccttcgtggtagataatttgaactatatccattgatgctattctattatgctgtgtagctttgccatatctttactctttaatgtgatctgtcctggactgagagaactgacgcctactaccaatgtgtttttatctgtttctgttgcactcagctaatctctgtgttataaacattgctgctgtattgctttgtccgtacgtattatgtgttatagacctaggaatctctcctttaaaaaataaggcaaagtgcttcgctttgaaacatttaatgcctttggtgtgaattactccttgactggaatgaagtctccagacctcgctctgtggttgtttgcagtggcatcctaggaagtacccatccctttatttcttttcctattaattccctctttcaccatggaatgatggaccagctattcacaggaggctccacaagcgcagagggtgtgggcggccttccagtttccacccaaccttccaggcgtgtcttccaatagtccccgtgtctctgcggccagggagacagtctgtcttctgggaaccggagcatgtgcgtgtacggttgcagagcctaactcttctgactcagtgtccatgaaccccactgccctgcagccccgcttgcctgcttttccattcccactgtgagaaggagggatacggctttgacgtttcgtgctgagctcctcactagggaatgtttttggtgccttctgaggctgggcgctgccgaaccctctgaccactagcacccccgtctcctcgtcccctcgtcccctccccacgctctccgccccgccccagggttgcagctcctgcacattctttgccctctgcgcctccctctgcccccgagtttcactggaaatgcagcctttggggatctgtggttcgttttgttttgtttcatttttcttgttgttcttctgggatttccaggagaagggagcagttgctaacttatatgtgatgtttacactggaagtttttattggatatattttgcccttcagtactcattgtatgttttttgtatcattttaaggtttttttctacaggaatgttttagtttggttatttaaatgtttttaactttttattgaaacttggataatgatttattacagaaatgctcgcagctgtgttattcaaggtggaaaaaaattgaggtgatctaagtgtccaacagtaaagaaatcgagtaattgttacacacccatagggtggattattcagtagccattaaaaatagactttaaccattttaaggtcaggaaataatattattattaaaagaaaaaatataaactgtctatgcagtgtgatgcacaattttgaatgcacacttcccacacacacacacacacagagaaaagaaaaaagaccaaagaccagaaataaatgtaccaacaagtcaaagaagtgaggttaacaaaattacaagtaatctaaaatattcttggaaaaagtctgtatttcctaaaaatatatcatttttccaatcaaaatataaatcagcctattatcatcttcctggccccacatttgatctcgttcctgttccactccctgtcttggtggatggtgccccggcccccatagcctgggatggaagcctgagtcattcctgcctcctccgttcccttcactccccatacctgactggtcatgaatccttttggttctgccccctaaacagctccaatctttgcaccttcactgggattgttctaatgatctgtcttctgatcttgagttagttattttcttatttatctcccagcctttatcctctcccaccttgataccacttctccatggattgtgccagtaccagcctaaacacttcccatggctccctgcagcctacaggagaaaatgcaaattcaaccagtcaaggccagccccagtctgactcgaatctacctctcccgccacacacctgctgcactccagtctctagggactctgaattctagcattgaacctagagtcaagaatgaccatcaaattctgtcagcactggccacacaacagactctgagcaaccagcacaaatcctggccatgccagctgccatgggcggccaaatcttccctgcctagaacttaatagatgctcaacagacatggcttgaacacatgaggaatggagggaggtgattcagtctgatgccccttttcagacagaacgagtgttaagccatgctaggaaaatgatgatgtctcaacttagagttgttaaagagtagaaaccccagattccgcatggctgatacacagcaggcgagccctaaaattggggcttagcccaggagggttcttggcttcgcccagcaaagaactcaagggtgagctgatggtgttaggcagcagcttttattgaagtggctgtgtgcacagcagcagcagaggtactgctgtttgcagagcagggctaccctgtaggcagtgtgcctagagtagcagcccagaggcagttctgtggtcacgtttatacccacttttaattatatgcaaattaaaatgtggattatgcaaaaatttctaaaaatagtgtggtaacttcctggtcattgggtcatggccatggaaaggggcggcaacattcaggtgtttccctggcaatggtaaactgacatggcactggtgggcaggtcttacggagaggggcttttgcctctttcctgtttcagctagtccttaatctagtccttcatcttggtttggtgtccaagctctacagagtcaagtcccacctcctactgagagatgaagccagctgggcttctgggtcatgtagggaacttggagaagggaacttggagaacttttctgtctagctaaaggattgtaaatgcaccaatcagcgctctgtgtctagctaatcagtattccgtaaaaacggaccaatcagtactctgtaaaatggaccaatcagttcgctgtaaaatggaccaatcagctcgctgtaaaatggaccaatttgcaggatgtgggtggggccaaataagggaatgaaagcctgccaccccagccagcagcggcaaccagctggggtcctcttccagtctgtggaagttttgttgtttcactctttgcaataaatcttgctgctgctcactctttgggtctgcaccacctttatgaggtgtaacactcacagtgaaggtctgcagctacactcctgaagccagcgagaccacgaacccacaggaaggaagaaactccagacatatctgaacatctgaaggaacaaactccggacacaccatctttaagaactgtaacactcactgcgagggtcacagattcattcttgaagttagcaagaccaagaacccacaggaaggaaccaattccggacacactacttcacagcaaccattgcaataccacttaatgttttgattgagcagtgtcaggtcagggcatgctcctgtgttatctccatacttgtccttgcacttttgcttttccctttaatcctttcagcaacctcactgggtagctagaacagacagtatcatgtgttatagaaaacagaggctctatcgctcagtgctttgctgggtgcctttccagtcaggatgtccaaattggtcaactgacttgtacgaatcttattacttattaaatccttgggaatttcagaggcatatacttatttcagttgtaagattatttctttattctgtattcaccaaccttgtgcactgtcgcttcatttccttggcccatgttttatatgattcaagtttgagttaccatcttccttctgtgaacttttatgcattaagggcatcccttctttcattggtcagctgacctgtgtgtaggtaaggaggaaacattcaaatagaaatttgcatccttggccctgaacactaaactacccgctgaaacaagagccacattctctcctatgaatcactaaatcaatgccttgtttatggatttcattttcattcactcaaaacttagggcatcaataaacggaggaaaaagacgataaaatactgaaatgagtgaaagtcaggaaacttaaatcgcagtcttgttgacgtaggagggagagaaggggctagaacaatggtctacaacttctctctttgttcttgctcatgggcactttcctctattggccctgaactctctcttgccttcaagtctcactagattttccttgcacagaattatctaggtcagggcttctcagagttgaatgtgtatgtgagtcacatggggattttcttaaaatgcatattctgattctgtaggtctggggtgggccttcctgacgagttctggggcaatgctgctggtccatggctacccttaccaagatctaggttacaattcctcccctagccccaccttcactaaactctctccctggttactgccgctcatccttcaggccccagccaggcctcacctccccctggaagccctcctggtcctcctgaggtgggataaaaatccccaccctaatgatattgattagtttggcctatatctgaacctgccgttgaacactgttccaccagggtcctgcaccatgcctggctcctgaaagatactcagtgactcttccaaatccaaatcgaatgaatgaatgattgcctgtatgttttgctctgtgctttctacagtctcattaaaacattttcagtccccatacagtaaaaatgtgaaatgtgcttgtgtgtgtgtgtgtgtttgggcatgcatgtgtgtgaagatccatttctataccatgcactcagcaaagacacactgatttcattcttgcagagctgctgctatcctccccatcaatcctcctgtgccttccagcccctcccctgcactcccactctccacccttccacctgcacttagcaggaaagagctccaggaggaggaagagcatgtctccatttgtcccctccccctgtgcacaggtggcctcaggtgactcctctcctgattcctaacatgtgcagccttccttcagttatcagaaggcatttgtttctctcattttctgaaaccagctccagtggtgagtcccaggcttgctcttcctaaggcttctgtggagcagccatctaccagatacaggagggggccactctgacaattccttccctgtaagatgggaatactaacacccaccttaccaagatagcccaggtgtgcatggctcagataatagttttgcttaccttcctgtcccagcatgtagcacattgcctggcagatatcaggtactcaacaaatattctttcactgaatatatcgttgaaggaagaaatgaaagcatttggtaagctgaactcttagaagaaatcagaggtattaatacagacagttttaatgtctttgaaagagaagagaatgaatccaatcaatagaactgcctcccaggtgtaggaaaattgaggtattcctcttggttctttactagggaaaccacaagtagctttgtaaaaatgcagtgactcaagttgtcagagggagaggaagaaggaagaggtggttcctcccatcgtcattaaaataaacctggttctttacctatttgctcactcgtttattctgttagtccccaaatatttgtggggtgccagtgtactccaaaccctgtcctcggccctggggattcagttgggaagcaaaggccctgtcctcatggaacatgagtctagcagagaaggggggtcacactccaggtaataaacaggttaacaagtgaatgtctaaaataatgccaggtgccataggtgctatggaggagggaaaaaaggcagagaaagaggagagtgatgggagggggggtgctaatttagagaaatacccccatggccaacatcccatcccatcccacccattattatggtccctttccacagcgtccctcacagcctgctcttttgtgacttttcccatcttggaggctaaccttggtagtgacagcccagcagccatcatctgcacaaacatttgggggaggttggaggaaactccaggaactggcctttcaaaagccagagtagcatgccaacaggcaggcctgccctctgccccaccagccctgcggtgggtgtggtgacaggctgtgccctgcaggctgggactcgcttctgggtccccttctcactcacgcttctgtggcagcccttgccccaccaagaggcaacccttgttcatataccaggaagcaagggtctggcaggaatgccatttgggaggtgtctagaagggcaaagtacttgagaagtgcattttctcagtaacagcagccagctcactcaccccactccctgattaggacatcattaaggtttcctttcattctgccctccttacctccacccattctacccaacaaggcccacctcgggaacaccttcatcttctcacctgcctgccctgccagtcacttggcctgagcaagctctgcttctgtgagccaaaccaccatctccatcttcctgtcaggagattgaagtgacctttccagggtccttttcaccttgacattctatgactctggtctcatattttttaagattcagatggtcaattgctcttttaataaactaaccctgtaaataagtatttccaggaagaaaaaaatgcctgtgacctggcagtccttctcaagctttgcacacacatcacaggggatcttgataaaatgaggattccaaagtgggggggcattcttctgttctaacaacctccccagtggtgctggtctggggactataccttgagtttcaggagtcagtatagcctctttcctccatcctttattgttaaactcagtggttctcaaccagggcaattttccctcctagggagacactgtcagtggtcacagctggggcattgcccctgaccatctagtgaacagagatcagggatctgctcaacctcctaccatgcacaggagagaccccccacagcaaagactcatccagcccaaaatagtgctcaggctgaggaaccctacatactaactcagcaggtctaattctgtctatacattagagtccctagagttcttttaaaaatatataaattcccagggcccctcctggacaatgatgttagaatctctgggggtggcacctttgttctgtattctttagatgttccctatgattccaatgtgcaaacccagctgagacccaacggcctcaaccaacattgactccaatggaggaaactgtgggctgtataacagggttggtgtgtgggaactttgtatgtcccatacaactgcagagcatgcattctgttaacagcagctgccatggtgtggagcagcctgaggacaaacagctgagtggtctgctcagtcaggacctggggaatctgaggcctttcccaagtgtgcttggtggttctgactgggccctgatgcaaaggacagggccaaggccctcatgtgtccccctttccaagagacccactctaccctaagtttatcactattggcttcaggtagcatggagactacaggacatttttttcattttatctttattaaaactatgaaggtggacagttaatcatcatcttaatcatctgatcatacaggtgagaaaaatcagagtcagaaaaaataggtgaactagccagaaaagtagcaaagctgacatcagaaccagaatttacaaattcaaagcaaataggccacagccattgtagaaaacagtatagaggtgtctcaaaacttgacaagtagaactaccatatgatttctggcaatcccactactggatatacatccacaggaaaagaaaccagtatgctaaagagctgcgctcccatgtccactgcagcacagtcacagtagccaagatttggaatcaacctaagtgttcatcgacagacgaatggataagaaaatgtagtatatatacacaatggaatactagtcagccttatcaaaaggaaatcctgaacctagaggtcattatggcaagtgaaataagccaggtacagaaggacacgctccacctgatctcactgatatgtggaatctaaaaatcttaaactcatggaagcagagagcagaacagtgcttactagaggctgggcatagagttggggagatgttggtcaatggatacaaaatttcagttaggaggatgaaaataataagtatgtgaggtcacacatatgataattagctcaatttagccatttcacaatgtatgcatgtttcaaaacattgtgttgtataccacaaacatacaatttttattcatcaataataccttaactaaagagctgctgcacagcaaaataaactatcaacaataaacagagaacctacagaatgggataaaaaaactcacaaactgcatttgacaaaggtctaatattcaaaatctataaaaacttaaataattgaacaagcaaaaaacaaacaattccatcaaaaaatgggcaaaagacatgaacagacacctctctaaagaaaacatacaagtggccaacaaacatatgaaaagtgctccatatcactaataataaaaaatgcaaatcaaaaccacagtgaggtaccatctcacaccagtcagaatggctattattaaaaagtaaaaaatcaaaacaaaacaatagatgctctcttggctgcagagaaaagggaatgcttatacactgttggtaggaatttaaattagcttagacattgtagaaagcagtttggagatttctctaaaacttaaaacagagctaccattcaacccagcaatctcactactgtgtatatatgcaaaagagaacaaatccttctaccaaaaagacatatgtattcgcatgttcattgcagccctattcacaatagcaaaaacatagaattgacgtatgtgcccatcactgttggattggataaagaaaatgttgtacatctagaccatggaatactacatagccataaaaaagaatgaaataatgtcctttgtagcaacatggatgcagctggaggccattatcctaagcaaattaatgcaggaacagaaaccaaatattgcatattctctcatgtgtaggagcaaaacactgggtactcatggacataaagatggtaacaacagacccaggggactactagagtggggagggaaggcagggggaaacggttaaaaaacgaattgtttggtactatgctcagtacctgagtggtggaatcattcatacctcaagcctcagcatcacacaatatacctatgtaacaagcttgcacatgtaccagctgatcctaaagtaaaggttgaaaaaaaaacttgattgaaaactggcacaagatagggatgccctctctcaccaatcctattcaacatagtgttggaagttctggccagggcaatcaggcaggagaaagaaataaagggtattcaattaggaaaagaggaagtcaaattgtccctgtttgcagatgacatgattgtatatttagaaaaccccatcgtctcagcccaaaatctccttaagctgataagcaacttcagcaaagtcccaggatacaaaatcaatgtgcaaaaatcacaagcattcttatacaccaataacagacaaacagagagccaaatcatgagtgaactcccattcacaattgcttcaaagagaataaaatacctaggaatccaacttaaaagggatgtgaaggacctcttcaaggcgaactacaaaccactgctcaacaaaataaaagaggacacaaacaaatggaagaacattccatgctcatggataggaagaatcaatatcatgaaaatggccatactgcccaaggtaatttacagattcaatgccatccccatcaagctaccaatgactttcttcacagaattggaaaaaactactttaaagttcatatggaaccaaaaaagagcccgcattgccaagaaaatcctaagccaaaagaacaaagctggaggcatcatgctacctgacttcaaactatactacaaggctacagtaaccaaaacagcatggtactggtaccaaaacagagatatagaccaatggaatagaacagagtcctcagaaataataccacacatctacaaccatctgatctttgacaaacctgacaaaaacaagaaatggggaaaggtttccctatttaataaatggtgctgggaaaactggctagccatatgtagaaagctgaaactggatcccttccttacaccttatacaaaaattaattcaagatagattaaagactcacatgttagacctaaaaccataaaaaccctagaagaaaacataggcaacaccattcaggacataggcatgggcaaggacttcatgtctaaaacaccaaaagcaatggcaacaaaagcccaaattgacaaacgggatctaattaaactaaagagcttctgcacagcaaaagaaactactgtcagagtgaacaggcagcctacagaatgggagaaaatttttgcaatctactcatctgacaaagggctaatatccagaatctacaatgaactcaaacaaacttacaagaaaaaaacaaacaaccccatcaaaaagtgggcaaaggatatgaacagacacttctcaaaagaagacatttatgcagccaacagacacatgaaatgctcatcatcactggccatcagagaaatgcaaatcaaaagcacaatgagataccatctcacaccagttagaatggcaatcattaaaaagtcaggaaacaacaggtgctgcagaggatgtggagaaataggaacgcttttacactgttggtgggactgtaaactagttaaaccattgtggaagacagtgtggcgattcctcaaggatctaaaactagaaataccatttgacccagccatcctattactgggtatatacccaaaggattataaatcatgctgctataaagacacatgcacacgttgtttattgtggcactattcacaatagcaaagacttggaaccaacccaaatgtccatcaatgatagactggattaagaaaatgtggtacatatacaccatggaatactatgcagctataaaaaaggatgagttcatgtcctttgtagggacacggatgaagctgcaaaccatcattctcagcaaactatcgcaatgacaaaaaaccaaacatcgcatgttctcactcataggtgggaattgaacaatgagaacacttggacacaggaaggggaacatcacacaccagggcctgtcatgcggtggggggaggggggagggatagcattaggagatatatctaatgttaaatgatgagttaatgggtgcagcacaccaacatggcacatgtatacatatgtaacaaacctgcacactgtgcacatgtaccctagaacttgaagtataattaaaaaaaagaaaaaaaacttgaaatcttcttttgtttcctctttagaaagatggcagacatttttattgagtggattttagaaattttcttgtcctcttttaaaaaagtgtgcgtgtgtgtgtatgtgtgtgagcactctactgctccttgcttggcttcagaaagaaaaaggaagcttttggctcccttctaaaaggggtatttccattgaaagaacaaaataagccaagttcattggcacaattgttgtaaggtgatgcaaccaaagagttttggatttgcattactaattgggtatgcggtattgtgttctgcaaacaagatggagaacaaactatgagaagggaacaagtttagtgtttttatttctctcagaaaactgcttttctccagccaaatcctgtgctgattaaatacccatataatttacctgtcaatgttgatggccaggatgattggaggtttggcttcaaccactcttttggattcttgtgatctaaactccaattacaattattggttggagccaagagcattgttatatgtgacaaatgttcaaaaaatgttagcttattattactcacagttgagtacagtttgaggtccttgaagatcagatcttcaaaaacagaacattgatatataacacataggtatggaagcatccactcgagtagccattgcagcaagtcatttcacttgagattctgttccctcacttcgaaacaagggcttgaggagcagacagcatataggggctccttccagcacgtgaaagttatgttgttctagatttcgattatcacggtaatggaggaaaaaaaatgccccaaaggagttgacctaagggaaacctagacattctgccagctctgcattttagcaggcatttattgaacacatacgtgcatacctgggaaatattcctgatatcctgagatatccaggagatatgcctgatatggagtatttgtatcatatatttgttggtcatttgtatgtcgtccttagagaagtgtctgttcatgtcttttgcccatttttttaaatggagtttaaatttcagactgctgcagtaaagcaaataacataaacaaaaaagttgtttatgttatatttacactctactgtagtttattgaatgtgcaatagcattatatctggaaaagtaatgtacataccttaattttaaaatattgctgaaaaatgctaacaatcaagtgtcttcagccaatcatcattattctgctgctggaaggtcttgcctcaatgtggatggctgctgactaatcaggttgttgaaggttgtggtggatttgacaatttctaaaaacagataacaataatgtttgactcttcctttcagaaaaatatttctctgcagcatgcaatgttgtttgatagcatttggcccccagtgcaaattctttcaaaactggagacaatcccctcaaaccctgccactgccatatcaactaagtttatatagtattctcaatcctttgttgtcatttcaacaatgttcacagcatcttcacaaggagtaaattccatctaagaaactatttcctctgcacatccataagaaataactccttgtctgttcaaattttctcatgaggttgtagcaattcagtcacatcttcagcctccatttctaatcctagttctcttgctgtttccaccacatctgctgtaacttcctacactggggccgtaaacccctcaaagtcatccataaggattggaatgaacttctcccaaattcctcttaatgttgatattttaaccacctttcatgaatcatggatgttcttaatggcatcttgaatggtgaatccttttcagaagattttcaattgacttttcccaagatccatcagaggaatcactctctatggcaagtatggccttatgagatgtatttcttaaactatgagacctggaacaaccaatcagagctcacctccttggccaatcagggctcagttgtattaaccaatcagagctcagctatattgaccaatcagggttcagctctgtcaaccaatcagaactaaataagtttcaagccttcatttgcataaacagacctgattggcaacttgggaaggcacttttgctataaaacctgggccttccctctgttctctggagtgcatcttaatttttacacgtgtggtgctgtctccccagtttgcaaatttttcactggaataaagtgtcttttctccaaattttttttttcagagaacttgttcacacagggttgtcacaaaccttcagtttgtaaaaactacatctgtaaagcacaataaatggaagacaaataaaaaaagctatgccagtatttaattcctgagtgtggatgcagagaaataaacacatatcctcatttccaggaacctacaggccaacaggtgcagctggcacccaaaggagtcctcaagcccagtttgcaaggagtacatgaaagtactgtgggggtgatggatggcaggcaacgccagaagcgttttcacagaaacgtggaaattcatttcacaggacctcaggacacaccctcagaccccatgtaatgttcccaggatcccagcaggaaagacccgggagctgcgcgccagggaccagaacagcgaggagaagtcaccagaccagacctcacgtgtgtgtgtgtgtgtgtgtgtgtgtgtgtggcagggggggggttgtcacagccggaaagggtagatggacacgaggggggaacacacggcaggggaggggcgcagcagaaaagaggagatagacacgaggggggcacaccacaggggaggggcgcagcgggaaaggggagatgggcacaaggtggggacacaccgcaggggaagggcgcggtgggaaaggggagatgcacccaacggccacacccagggtctgaaggctggagaggcaggccatgtagaccagatctgcttcctggggtctactggcggaaacttcctcatagactggattcgcgactgcgctgttcccgtgatccactgcgcctgcgcgggcgcctggctgggctcggcgggcatggctggggcaccctggcgccatctttttccaccgtgcgaaggcaggagcccgagactgggtgagaggacgcggggctggcgtggggaggggaaggatggacggggcaggacgctgccgcctgcatctgggaccctgagcagcccgagggagtcgcccccgaagggccccaggttgcctgcaccggcggtttcccacgtgcccaggcacctcccgttgcggctgcgcgtgcagtcgcagacagcccccaactcccgtctaattctcagcccctaggagacccgagcctggcacccatctgcactcatccccagacaggggatggggctgcctgggcatggaccccaggctctggcccaaggcctcctggcttgccccggcctgcaggcagcgggtgggcactcaggagcccccgaccccacacgggcgaccagggactgcattcccagcagaggattccagaacctacttcagggggagggtgacgcctggggatgggatcctcctgcttgtccctgaaaacattgggagccatggaggctttcatctggtgccagtaggaacgttccctgggggcagctgaaaggcatctggaaagaagtgaccgtgggtagggagaccagctaggtggatgctatggtcaaccagcaaaggcaggggctgctggagtgaaggaggagaatttgagatccaagaaggaagtgggatcaaaacaaggaagcacacagttccagggagagattggaactgaagggatgacgtgtggaaccttgtgacctccgcaacacgttttcctcctttatttgaccacgtatattttcattgctccaacaatgcagaaaggaaatgtgtacaaaatcatgagtttccaggcttgaacctcttcatctcctggaaccacactccaggtgggtagaggtctgcaggctgaatgagaggggagcgacgttttcaagcactttacagggagatagaaaagaaagtggggttggtgcgggttccatgcagaggtataggcgatatgcccttggcttgaggagtgaggacatggggatcagtaaagggtaaggagcagtcccatgccagcccaaactaccaacacgtggccactcagtctcacttaggaatcccatggatttcagaaatacgttctattttcttctgtttagcagtcttggactgtcatatacatatactgctatgagtttttgttttgttttgccttctttctcaaaggatttgtgcttaagaaaaaaaaacctgttttccttggaatacaggcatatttggagatattgcagatttggttctagaccactgcaataaagccaatatcacaatgaagtgtgtcatacaaacattctggtttcccaatgcacataaaagtaatgtctacattactccattaagtgtgaaatagtatgtctaaaatacaatgtgcataccttaattttaaaatactttattgctaaaagtgccaacgttcatctgagacttcaaagaatcataatctttttgctggtggagggccttgcctcagtgtggatggctgctgactgatcaggacggtggttgctgaagattagagcggctgtggcaatttcttaaaagaagacaacaatgaagtttgccacatcaattgacaaaaggtttctctgtagcatgcaatgttgtttgatagtatttgacccatagtgtaaattctttcaaaattgaagtcagtcctctcaaactctgccactactctatcaacgaagtttatgtagtattctcaaatctttgttgtcatttcaacaatgtttacagcatcttcaccaagagtagattccatctcaagaaaccacccatttcactcaatcataagaagcaattcctcatcggttcaaattttctcatgagattgcagcaattcagtcacatctttaggctccattcttaatgctagttctcttattatttccatcatatttgctgtaactgaagttacactgaagtcttgaagtcatcaaagttatccatgagggttggaatcaatttcttccaaactccttttaatgttttattttgacctcctcccatgaatcacaaatgttcttaatggcgtcttcaatgcagaatcccttccagaaggttttcaattgactttgcccagatccatcagaggaatcactctttatggtggctgtattcctacaaatgtattccttaaaatataagacttgaaagtcaaaattactctttgatccaagggctgcagaatggatgttgtgttagcagatacagaaacgacattgatttccttatatgtctccatcagagctcttgggtgaccaggtgattgtattaataaatgaactaatgttttcaaaggaattttttttcgaagcagtagatctcaacagtgggctgaaatattcagtaaacaatgctgtaaacagacgggctgtcatctaggctttgtttttccatttctggaccacagacagtagatgtagcatacttcttttgtaatttttatagatttgggggtataagtgcaattgtgttacctggatgttatattgcttagtggggaagtctgggattttagtgcattcatcatctgaatagtgtacattgtatgcaataggtagtatttcatccctcaccccttcctccttcccatttgacatgcttcttaagggccttaggcattttggaaaagtaaatgagcattggtgtcaccttaaagtcagccctaacaaaagagttagcctgtctctgaagcttcgaaccagtcatggacttttcctctctaactctgaaagtcccagatggcaccttccaatataaggctgtttgtctacattgaaaatttgttagtgtagccgcctttatcaatgatcttagctagatcttctggaagacattctgtagcttctgcatcagcacttgctgccttacctttcacttttgtgttacggagatggcttcttttcttcaacctcatgaaccaacctctcccagctcccaacttttcttctgcagcttccacacctctcagccttcacagaattgaagaaagttaggaccctgctctggattaggctttggcttgaggaaatatcatggtttacccagagcaataaaactttctccatatcagtaacagggctatttcactttcttatcatttctgttttcactggggtggcacttatcatatcctttaaaaactttcctttgcatttataacttagctaactgtttggcacaagaggcctggcttatggcctctattggcttttaatatgccttcctcactaagcttaatcatttctagcttttgatttaaagagaaatatgtgtgactgtttcacttgaatgattagaggccattgtaatgttattaattggtctaattcaatattgttgtatctcagggaacaggctcaaggagagggagagagatggggaatagctggttaatggagcagccaaagcacacacacatatatggatgaagttcactgtcttctgtggacactgttcatggcacccccaaaatagtcacaatagtaacatcaaagatgtctgatcacagatccccataccatatatgataatgctgaaaaagtttgaagtattgccagaattaccaaaatgcgccacagagacaggaagtaagcacatgctgttggaaacaaatggcagcagtagacttactggaggcagggttgctaggaaccctcaatttgtaaaagatgcagtatctgcatatgaagtgaagcacaataaagtgaggtgtgcctgtatttcaagatgtgtgtcatatagttcttttttatacataatcccttacataacttgtttctaaatcaacactgaaattcagccagtttttctcttgatgtcttatgacagtgagagataaaataacccattaacataacaaccgtagtgaccacttatgggatgcctcatttgcatccaggattattcaaggtaccttctctccattttctcacttaatccccacaaccaccctatgagatgagtgtcactgcccctgttgtgtagatgaagaagccaggctcagagaggttaaatggcatgccccaaaccacccagccatgagggcagaagtagaggttctgggtagtgctcacccaacttccatgctcttcctccaaacaatctgtgcagctgccgtcagcagaaatggctttaacaagagtgaaaagcagtagcaaaggcaacgagtttgggtgccagtcttttgattgttggtttttgtttttcttttctttttttttttttttttttttgagacagagtttcactcttgttgcccaggctggagtgcagtggtgtgatcttggctcaccacaacctgtgcctcctgggttcaagcgatcctcctgccccagcctccagagtagctgggattacaggcatgcacccctacacccgactaattttgtatttttagtagagacagggtttcgccatgctggtcaggctagtctcgaactcctgaccttaggtgatccgcctgcctcggtttttcacacattttgcagtccaggcgaggtgcaaataaacagtgaaatggtcatcaggtcccaggagtagggttgggacaagtaggaagagaagtggtggcagggtcacacagactctgggaggtcagcagaagcatgtggatcttcccttgcccttgacctggtgacctcccactttagattcatcttcacaaaaggaggtatgggatgtgttactgggaccaagaagactctgatgcagggtctcaacttaagagaccgaggctctagctgagtggccttgggctacacacagactttgtgcacttcagttgcctaatgggtaaaagacagggtggccagggatttccacactgctcaagtgagcacacagcatcatccgccttcaggactagctagttagatgatcctgtaaactgtagtactgatttatattctacttttggtcaaaatctcttttccaactggagtctccttttctgacaaatggaccataatagcttcagcctccccttggagctgttttcttacttctgtgtcactcaagttcatgagagttgggtgcctttccttcccacagtgggtcacccatgtgccagggtctcttccttgctaggcttgagttctgcttccgcttcttcctgtcctcccatgctggccacgagcatcatgatgatgcagaaaacccataagggacacgtggaactgtaggatatacacatccccagtcacagttgcagatcaaaccatctaaaactttggattcttcccaaaacctgcagtgtatgtttcagggtgcattgctgcagctaagagtgtgaacccacacctttccaaatgagagccatggattttctgtacagacacatttggcacattcaggagactcacaggggaaacagtttgcagcagctttaccggcagaaccaacaagaccagtttaaaagcttagacgcattgatctgaatatttgatggctgtccttcctgagggcaatagtcatgccccagtgccagataccatcacgcttgggaactggacatttgcattaccacctggtccacccaggttgtttcccagaacaaaaggggagcaacccaaaatggtgactttccctctttcaggagagctcagtttacctttgcctgcctcttctggtcccattcagactcagaaatttttatgtaggctaagctttctgccaagccagagttcacaggtctctgggtttctcatcctcccagcctggtgctgcagggaagtgactgacagagctatgattcaggaaggagggtgggagtttctacccaaaggcagccttgctcagcctcaacatcttccttgtctcttggttctcttgctccaggagaagcctgcggtctctccactgtcctgccagtcatcaccctggctctccatggctatgttcacaatgagcctcaccccaccccggccccgcatcaccagttcctcttggtggcaccacgtgaccatacacactcttttggccacacaggagcctgtggggtcactgtctgtcctctgctcatttgtgggttttccactcttggtgctcccatctgcagctcagtcctccctaggaaccccgtgagctactgcctcattttctggatctttgcactagaatgtgagtggcacaagttccatatctgtgtcacttttgtgcactgatgcatctctgaagtttacacattgcctgagatctagtaggtgcttcatccacatctggctgattgaactgaattgaactaggacctgtacttccactaaggtgctctgtctgggtttctggcccttccaaaatgagcacacccttctcccaggttggaagagctctgaagagtcagccctgcaccatcctctggtactcccagggtgcatgctgggacacagagagcctcttgctttccacgtagttggtcagctggccctgattctggataacatcacccctggctcagcaagcctggctgctcccagccctgtagggtgaagggcagctgcataagtaatgacaagtgtaagtgtctgctggcatgtttcatgtgttatcccatttaatcttaacagttcctaaaaggatattttttccccatttcacgtatttttttaaaaatctgagtttaaaaagtattaaataagttgttccaaatctgttagtttggtgaggaaccttgattgacaccaagtctgactctaaacctaggttatctgtccctttcgtttccaatggatcttctcagtgtttcagccaggcagtctaaagcagtggttctcaaacattttgctctcaggacccctttatacacttaaaagtgacggaggagccccaggagcttttgtttctgaaggttctggctattgatatttactgcattcgaagttgaaagtgaggagcaacatgacaaaaccctgtctctacaaaaaaaaaaaaaaaatatatatatatatatatatatatatatatatatatatatatatatgtatatatacaaaagttagttgggtgtggtggcacacacctgtgattccagctactcaggaggctgaggtgggaggatcgcattgaacctggaaggttgaggctgcagtgagctatgatcatgtcacctcactccatcctgggtgacagagtgagaccctgtattaaaaaaaaaattaaaaatgacaaatttttaatatattaattcacttagaaataaaaacaatacaaccattgcctgttaacataaacataaatagttttatgaagaacagttttattttccaaaacaaaatatctagtgagaagaatgacattgtcttacatttttgcaaatctctttaatgtccttagcagaagacagctggattctcagggctccttttgcattcagtctgttgaaatatgttgttttcgttgtaggtgtggagaaaactagtttcacacagatacatagttggaacagtgaggagtaccttaatacccttttcagataattgtgtgtattagtccattttcacactgctgataaagacatacctgagactgggcaatttacaaaagaaagaggtttattggacttacagtccacatgactggggaagcctcacaatcatggtggaaggcaaggaggagcaagtcacgtctcatgtagatggcagcaggcaaagaaagctcttgtgcagagaaactcctatttttaaacccatcagatctcatgagacccattcactatcatgagaaccgcacaggaaagacccgcccccatgattcaatcatctttcactagacccctcccacaacatgtgggaattatgggagctacaaggtgagatttgtgtggggacacagagccaaaccatgtcattgtggatattattatttgatactgtaccaaaacttgatgcgtggtagtttacactgtcatgttaaaattaattgctctatctggcactttgaatgaatctttccccctctaatgattgtatatatgtatataattttgtataatgattattatacatccatcatttaaaagtgctggttcactgagtcacacagaccttcccagtgcacagttgaaagctccactgtagaattctgagaggatgagaacaaaaagtgcagctgttgtctttgtattaagttttgaccttacaaactcactccagggtctcatggatcctaggagttcctgagtcgcaccttgagacctgctgggctgtagtataaattgaatgatcactgaatgcaaagccctatgagaggatacaaaagaaataaaacattaagccaaatatcttaacatttaaaaagaaaagcatgtacaattcagtatgtgagtctgaagaaaggcaaatgaagacctgaacatgtaagttatgaagcagaaaaagccattctgggtctcactgtgtgtgtgagagtgtgtgtgtgtgtgtgtgtgtgtgtgtgtatgatgtctgcatctaactgtgctacatctacattgtgatgactcaatgtccccaagccacagaggcacattgtgccagcctctcaggagctgaggggtggctggagagtttggaatgaccagaggcctgtgttgtccagtgggaatggggcagagaagaagcaaggcttaggggaggccttcaaggaagggcagggcagagtgtagcgagtggggaagtgcagaccccacattgttgggaccacagattgttcatcctagtccttctgaaggaggtgggaacatcctgaagtacgctcagctaatcagagctgaaagcaggcttctcgaggccactctaggcctgaaatggcacttgaccatgctgaccagacagagctatgaatgtaccttcaaaggtccaatcccctgattggctctgtcatcttgaaccatttgttttttcttttttagataacatgttttattgaagtgtaatttatatgcagtaaaatacacaaatccttgatatatataaccctataaccttttttataggattcttgtatattcaccaagataaatacaaagaactttctgttgctctggaaagtttcccttgctccatcttactcaacaccaccctgcgtctgcactcaggggaaaccactgttctgacttctgtcaccacagatgaatttgatccattcttgaacctcatcatacagtatgtatgcatgtcgcatttgatccattcttgaacctcatcatacagtatgtatgcatgtcgcatttgatccattcttgaacctcatcatacagtatgtatgcatgtcgcatttgatccattcttgaacctcatcatacagtatgtatgcatgtcgcatttgatccattcttgaacctcatcatacagtatgtatgcatgtcgcatttgatccattcttgaacctcatcatacagtatgtatgcatgtcgcatttgatccattcttgaacctcatcatacagtatgtatgcatgtcgcatttgagagtcatcatgttgttgcctttgtcagtggggcatttttgttgttgttgttgttgttttgctgagttgtattccacatgaatataccaaaatttgttcctccattttcctgtagatggaatgttgggttgtatatggtttgctgctataatcacatgtggatactgtggacagagggtatgcagttttttctctaggatctagctgccatggatgaattgcatccacccccaccaaaacaaaaacaaaaacaaaaacattcataggttgaagccctaatctttcaattagatggctttggggtggttggagatagggcctttgggaggtaattaggctcagatgaggtcatgaaggtgggccctcataataggattagtgcccttctaagaagaaacaccagagccctcacttcttctctctgtttctccaccatgtgaggacacagtgagaagacagtgatcagtctgcaagccagggaaagacactcaccaggaactgaatcagccagtaccttgaccttagactttccagactccagaactgtgagaaataaatgtgtgctgtttaagtccccagagtatagtgttcgttacagcaaacagactaagtcttgcctaaggagactaaggcaccatggcaggtgccccatacatatttgttaatttgattttatttgatctgtgtctatttcaaaggtaatgtcaacatcaaatgacaatctagagggaaaaatgtacaatgaaaatatttttaaaaacagtagttcttgctattgatgatgttttattttaaaaggaatatgtaattaaagtaatttaaggaaatatgatgcacaacagtccactgggcaagggacttaagtggacatttctccaaagatgatatacaaatagccaacaagagcgtgaaaagatactcaacactactagcaattaggacaatgcaaaccaaaaccacaatcagatatcacttcatacccattaggaaggctactattaaaaaaaaaaaaagagagagataacaacatgcgttggtgaggatgtagagaaactggatgccctgtgcactgagtgggattataaaattgtgcagctatggaaaacagtatggtgattcctcaaaaaattaagaatagaattatcgtatgatccagcaattccacttctcagtatgtatccaaaagaattgaaagcaggatccagaagagatatttgcacacccatgttcatagcagtattattcacagtaattaagaggcagaagaaacccaagtgtccgcggatggatgaatgaataaacaaaatgtggtacatatgtccaatggaattttattcagccttaaaaagaaaagaaattttgacacatgctacagcatggatgaacttggaggacatgatactaagtgaaataaaccagtcacaaaaagacaaatagtgtatgattgcgcttatatgaagtatctagagtgctcaacttcatagaaaaagcagaatggtggtttccaggggctgggggcaagggtaaatggtgagttgtgcaatgagtacagaattttagttttgcaagatgaaaaagttctggagatcagtaatgtgaatttatttaactctattggactttacacttcaagatggctaaggtggtaattttaggttgtgcattttttagccacattttttaaaaattgaaaacaaacccagagataaaagccttacctctgaagtcaggtgagctaaagatgaaggtaagattggcggtcagttcattggtttaagggagtcgttccaactagctggagagtggcttcttagtattcttgcacagcaggtccgagtggcatccagactcaaacgggccgtgctcaggcccaacgctggcatgattcttgagtcattaggaaggattccttactgtggagacccctgtcttctggtccctctggtttggggagactgcaggtgggggtgaactggaggaataaagccacattgtccacaggacatgtgtccctagaacttcccaggagcaaagacaatggtggagggagactcagggccaagcccaccagggtgacccacagggtggataatgtccctgggaaggcagggcaccttgggcttcttgagagagcagaggccggagcagagtagaactaccaagaaccagccggaccctggggcggggactgggtctttcgcagaccctgcttccctggagctctcttctgcaaaagtgaccaactgggctcggagttttaacttgcccttgttacctgaggccactgtgactatcatgggtcaaaagtgctataaaaacctgatgtgtgtttggaatgaaggtgtacccgtggatggggagagaggagctattcctgtttggggatcctgatgtcttcacacatctgcctgacccccactcctgaagctccttggtcatcatatcatataaaggaggacctgcagacccatgccgtggccagaggggctgggcatggccctcgcttcactttcccagaatgaattcatcatcctggcagtaaaagagaaaacaagaggtggggcgcctgctaggctgggctgggctggcaacagcgagcctgtagcgactgttctggaggaagcaaagaagaccgatggcctcagacagtggacatggacggcgaacttggactgggctgggcctctgctttgtcatttgaaaggcttgggtcatgcttccctttcctcttgggagacattaactgggagcctagggagccaaagtatcaagtggcgtcgtttcctcccttcagagccaaccttgctgggcttctccggtcagatcagccctggcccggggtcagcccggcggggaacgggtccaccctccgccagcgacctcagagctcccgggcacagcccggggcacagccccgcgcacctgccccgcccacgcccgccccgcgcacctgccgggtccgcacctgccatttgcccgactggccgcgcacccagctggcccgcccctgcccgacacgaccgctgcccgccccttgccttcctgacccaggggctccgctggctgcggtcgcctgggagctgccgccagggccaggaggggagcggcacctggaagatgcgcccattggctggtggtgagtgcgcccccgcctcggggcgagggtaggggcggggaaggaggaccccaggggaagcgtcgctccccaaccctgcctgggacccgccacgcttagcaaaagcgggagggctggttcttggcgccgaggctggtcttagacctgggatcaggaatgcgggaagcgattccagagggggcgaacagcgggggtttccagcagggttccccgaccctgtttccccgcgctcgccaggcctgttcccgccgccccagccggggtgcatgggattagggaggaacctggaatgtaacactgtaacattttacttggaaagtagattggtggggagcgcaggcacagccccgcacccccaccccccacccgggctctccacgcttctccttccggggaagggtacgcgcctgcccctgcccctgaccttgcacgccagggaggggctggccgctgccagttggtaaggctgtttttattttttccatttttcaaacgacttgacactgtggacgatttggaaaaataggaaaaaggaaaggagaaacccattattttgaccagtcatcgcgtttcttgcagtctgtcttagctgcgcctctgtcctctgtcactttcctgtcacagaccatctcgggtcctggtgtccactgccctggcctctgtcacacatgccctttctaattggttttgcgggtctcctcctataatctgaagaacatggattcctcctggagcgacgtagcctggctgtgtaaaatggcaggttcagaagtgggaagttctctgggcctcttcggtagatcacttcctggtcctggatcccaggtcctctgtagtgagggtgttggactgaaccatcgccattcctgccagcaccagcattctggctgtgatcacactccagcaagttctaaatgctctcttttctgcaccattcccaaatgtaggaaagccgcattttaagatttttgcctcgtgtaaaatattcatattttccttaaaaactataaatgacactgttttcgataacttgtgtggattgtaggagagatatgtatctcctcccttagggcaccgactttcattatagctattctggaaaagtgttttctattatttctgtattgtataattattatttcctggtgacttatggacaatactgaatatgattacattgctttccctcagccaggactttttcacatccggacctcatgattcactcatgagctgtggggtcctttcgtaggaagcttcgagatgacaccaggtttgtatttatccaggtgtatttgattgtggagaagctgcccagggaactcagagatgcctcacttttgattttatgagctaaagatcaggagacattattggagtgggccttgccctggacgcttctgtccagtgctgggtttgtttcaggcagacgttcccaggagggacattcagactgaatgggaggagcaagttgagctgccgccatgccttcgcctgcagggcctggtagtgggtatcgtaataccttgaagtgggcgttggcctgtggaccgtcaaggccggttacgctgcactcctgctgtggtgtttcagagtggcccttcctagcccttctgccaaaaaggctcagtgcacaggacagtgatgacagtggacactgaggccagcagagcctgggatcccaaaggcagtgagtcccaaaatactgaccatccaccctcatctctcctggcctctcaagtacaaaaggtgtgggtgtggccttcatggtgaggtgatctgaatacatattggtaagacagcagtgaaaacagcttccctgtcctcgttcaggttgaaggaaatcccgtcaatagacctgggtcctagggcctgagattgccctttttaggtggcccttggactggagggagggagagagccctaaaatcctcctacctgtaacccagtgtcatatccatttggtttcagtattactttctttctggcaccttttaaatgtttattgtttacagacagggtcttgctctgtagcccagactgaaatgcagtggtatgatcatagctcactgcagccttgaacttctaggttcacgaaatcctcctgcctcagcctcctgagtagctgagagtgcaggcacatgccaccatgcccagctaatttttttaaactttttgtagagatggttgcctatgttgcctaggctggtcttgaactcctggcctcaagttgaactcccgggttccttagctttccaaaatgctgaggtaacaggtgtaagccactgcacccagcttctggctcttaagtgaagcagccaggaccctcctgagacccctgtggatctgagagtggggattggctgggacatgtgtacatgtacccacacacatgcacacagaggcagacacgctagaggtgagtctcttaggagaaagttcactagctttccccctgtgctaagaacggcctttgctctaacactcatcctgtctgctgggcagcaagcacagtggaggagatttccgtgagctgatgatgactttattaccttacagggaaaggcaggatcctggtttcaaaatctcagaagtgttcctggactctgtgcttcctcccccacctctgaagctgctgggtctcctcccatcggggcaggcccactggggctccgcgagtcatcttagtggaagccctgggctcctaagctttcttcttcccaagtgtgtcccagcttcagcgctgattcttccctactgcctggtgtctgagcctctgtcttgacaggctgcctcggctcctgcccatcctgctttcatccccaggactgagctctgattgctggtgtccaacccacagagaggctgtgccacagctcgcccggtgctatgttggggctgaattgtgccttccccctgccaaccccccaaccccatttacatgttgtagtcctaacccctgcccagtacctcagaatgtgactggatctggagatagggtcgttaaagagctatttcagatatagtgaggtcatcagggtgagccctgatccaatctgactggtgtccttataagaagaggagatgaggacacccacagaggccctgtgaggacacagggagaagatgccatccacaagccaaggagagaggctcagaggaaacttgatcttggacttccagcctccagaatcttgagaaaataaatttcaatttcaatttttttttaagagatgatgtctcgctgtcatccaggctggagtgcaatattgcaatcgtagctcactgcaacctcaaagttctgggctcaggcaatcctcctgcctcagcctcctgtgtaattgggactacaggtctgtgccaccacacctgactattctttttaaaattttttgtagacatgaggtctcattatgttgcccaggctggtctcaaactcctgagatcaagccatccctccaccttggcctcccaaagtgctgggattacaggcgtgagccaacgagcccagccgaaatttctattgttgaagccacccagttggtgttaatttgttacagcagcctgaggaaatgatgctgcctgcctggattttgtctgtcacctcctggctactatgtcctgccctccctctagcggctgggatacttccatgactttgtgctagacctgagcacaggctgctggttcagctcatcacccatcttctgatgatgtcccgatcccagtgctggcggctggatctgcctcccacccaggaggtggttcagactctagatcatggcttctcccagccagctgcatgctgcactccagattgtccccagcctagaggtcattggatgcatccctcacccaaagcacagatactctctagtcttcctgggagtcctgaaaagtgtcccggaagagagctccctgccgcatcaggacccgccatgggctacccttcttcttgtgaggacacttggcttatttattctccgttttcttctctgtcgtgtccacatgtttgtttttgttcagctggggccaccgttacctattccttcatgtagctgcttgttacacattcaaaaggtaaataatgttccttttcagccttctccaagctaaacagcagcttgttgctcaggatctcaggtgtggcgtgttgtctagaagagcccctgaacattgtctggttagccagtttccttctccaaatacaacacttggatgaaacagtccagctacgacccacatgcacagaatacagggcacggccttttcctttgaacgtgttctgctgctgtcttagcccactctgcactctgttcatccaacagaattttctggaaaatcagcgacccacgcggtgtcacaggcatgctgggtggccctggagggaagcatctgtggtgtctgtgtgggcgctgtggctgggctgtgtaggggagagcaccctctaggcagagatcactcctgcagaggagtgagcccgggagtgcagcgcccgcaggtggctgagcacaaccgttggcgcagctgcgggagaggggcctgcaagcctgcacctgtctcattttgttttctgtgtctggtttatctgctttgagatgaccttccagtcctgaaaactgcactgatcacactgccttgggcctctccccagaggaaaccacctgtgcttactagtctaacaatcttagcagtttggaaattcgaaatttaaaaatggtgttgaaatatgcactcaaaaaagcaaaacaaaaccaaaccccaaggctaaccagaaacatcgcgttctatccccatggctccctctgctgaagcgctgggcctccaagcaatagcacacgctgccttggcgcagcatagccggtgcatgggtcggggacagctgcgctcctgagaaaggaaggatgatctctaggtgctggaagtcaagctgaggtccagaactgcaccccgggtggggcccattgtcaggcccttcagacttgacattcccttctcttcctttcctttttcctcctttcctcatttccccttcacttccttccttctttcctccctgtctctctccctccttccctccttctcttacttcttaggactgtccctattagcacatatttaaatgcactgggcacataccccagtacccatcctactcagggcctgtggttatccctgcatcgtagcaatctgggtaagcaaactgctgaataagttctgatctatgctatatttagggagcaaactctaaaagccctggccatgggttgccaatgaaaagacagagagccaccccccaggcctctggtgacccaggaggagatcaatgccttttccttggaaatcgtgccactcatgtcaaacaagagaagtaagatattgttgccaatcaaccagaaagatatctccacggactttctgtcactgggaaccttgactggcccagcaggcacatccgggatgatagaacaggtttggggactttttcccagtattacggggccaggccttgatccagcaggaatacgttgcatgcttgctgggcatcggctactattcccagtgctggtgatatggaaatcaacaaaacagacagagctttacccctgaaggtttcaatgtaattgcaggagcgtgctcaaatccagttgtgtctcacaaagggaatgaggcgcttttgttttttcaggttcacgttgggcatgctggctcacaaggtgcttgattagctgctttgacataaacgttcaaggacgtttgttggttaagttaagacctaaaccaacagcaaatacaacttgccctggaaagcattcctgtcttgtttgtattctctgatactgtctacttcaaaggtcctgacaccgcctcccaccctgggagcctcctcccaggagcacagtgcctatagcgcagtcccctgacactgggccgggatgaaaagccacaggggggatggggagggccaagggccagggccgccaccaagtcgttcacagcagctgcttggtgtcctctctgcaggcctgctcaaggtggtgttcgtggtcttcgcctccttgtgtgcctggtattcggggtacctgctcgcagagctcattccagatgcacccctgtccagtgctgcctatagcatccgcagcatcggggagaggcctgtcctcaaaggtgagtgccgtgcttggggcagacggctgccttcatggcttgtgtgcagagggaggagtggtggtttctgtcccagctggaggctggggggccctgacggctttatatcaggaaggaggaggagagaagcattttgcagttactcatttaggtcccacgccattccaaggcacgtgccgctgctgaccccatgtgagactagaacagtgtggcttctggttaccagcacaaacctgcagccagaccttgaactgtgctctttccgcccagatcttggcttcctcccctgggaagcacaggagggtccaggttctgagatcccgaatcattttaaggtttctgtcggactgaagagctgttggaaaatcttctgtaaagtcttgggaagcaaaagctagtaattgagtagatgtgaaagaaagggcagacattgtatgtcggtgaacacacggcctcaaccatcagcttaggaaaggcccagctctctgtagggcggctgctttctgtccttccccacaatcaaggtgggttttctgagagcctgctgtgtgctgggcatgtccaggagctaaggagagacggaggacaagcccacgaggtccctgcccctttggcactgataccctagtgaggggaggtgacagcttaacgcatgaacaaatgagattcgagagaggatgggtggggaaagcctctgagaaggaggtgacaattgagaagcatctcagtgaagcaagggagtgggccatgctgggttctgagggctgtgtgccagtttgggagcatcatgacttagtctacccagattactgtaagagaacaccatagactgggggccttataaacaacgcatttatttctgacagtgttggaggctgggaagttcaagatcaaggtacccgcagatttcatgtctggtggagacctgcattctgcttcatggatggctccttctggcaaacgaggtctctgaagctccttttataagggcactactcccattcctgaaggcttcatctgccaaaggccccacctcctaacaccagcactctggggattaggttccaacatatgaatttcagggggacacattcagtccacagcacatgagttgcaaactgggggcccagagacagacctgtcagagacaagatttgtctaaaagcaaaacacataaaatatggacaagtatttcaaaatcaagagatctcccataaaactccatgttagagcatctcttgaaacagtagaagctctgataccccaggccctcattcctgcaaggccatgatcagccacagctgggcaggctgtggttacacaagggcgagagtatggccaggaccaaagggattcatccagtggccagtaaagtcacaggaacagggaagaaacaaggaaaacgaggtccttgtgctttatacatagattatctgtaagtcacactgatcactatgttctttacttcctggtttcaatcttattttacaatacacattctgggacagactgaattatcgccgaaggaaatgcctactgtgaaagtccatttatttattaattcagcaggtatatttagtaacagcatccctctctgggccgtggtctgagtgcacgtgttttaaggttcatcctttacttctaagaacctcagagtctactagagaagaacttaaaagccaaatcataatgttaggaaactgaacaaagaaaattaatgtgcagcgtatgttgaacaaaaatatgcatttggggcctggcgcagtggctcacacctataatcgcagcactttgggaggccgaggcgggcacatcacctgaggtcaagagttccagaccagcttggccaacgtggtgaaaccctgtctctactaaaaatacaaaaattagctggacatggttgcaggtgcctgtaatcccagctactcgggaggctgaggcaggagaatagcttgaacccagtaggtggaggttgcagtcagccaagattgtgccactgcattccagcctgagtggcagagactccttctcaaaaacaaaaacaaaaagaaaacaaaacaaaaaacatatatatgcatttggaatacaactccaattgggaaggggtgaaagaagcatttgggtgccaaatgcacacccagccatactaccttcactgtactcagaggcacctaataaatcatgagcattgattagcagagaaacactctttgatggcttctggtctttggtttttgcggactggacttttaatctcctatagaacaatgaggtagttgaaatggtcaaaatgccatatgcaaacagccaccttctttgtttgcctggtctatattgtcaggatcttatttcatgactcaatatttctagtgactttgcatggatctcctaccctctggaataatcttcctcatttataggagttaaaatgagatcatagttcccaaatcaggaagtatttttaaaagacagattcctggaccccactctgggaaattcaaagctccctaggtccagggtggaagccaagaacctgtatttattttaatttgttttaaaacttggcttcatacagagccaaatttgatcatcctggaactaaacggtcactatggtttcttttaaatctaaggttctttgtgatttgtatctaaatttcataaaacctcctctccacccttccaagtcccagtctacatattcctgtggttacagcatatctggggaaagccaccaggagagtccggacgcaaggctgtgcgagctctatagctgggttctcattgctgtcgctactttcagagctgggtgaagcagctattgtattataaaccaggagctgctcgtgaggatgaggaaccaggtggattttcctcagcaagagaataatttctcagactgaaactgatagcagaaggctgactgcatcctagggaatggtgttgctgctggaggctttcagtcttaaacaaaccagcttttcatgaggcataagaaacaggagactaaatagaaggtccgccgttctccctggctaggacactggcttctacgtaagccacatgaactttaccttttgattgtttgggggaaggaatttcaggaaaagcactgaagacctagatgtggttctccaggcagggtttggaaagagctgtgttttcccaggagctgtgtccaccctccaatcccacactgagttaggaacatggtcttctttcttcattcacgtggtgacacattgtgcttctgggaaacggatgggggactcagaaagctactgactctttttttaaatgacacatgggttccctgcccactcccaggccctgtgaggaaacacaaatgcccatctgtgtgtcacccatagtcactaaagccacatactccctggaggatatgaggcacatcaaacacctcccttctggaaagccctcctgcgcatgtccacacgaaacaggactctcactttgcagagcgccaggggctgcaagtctagaagctggggaggaggccatgctcatggctgacgggctgccaggccctggcgtggggacctgctcgttctgctgccgatcccgtaggggaagtccctggggagagcatccctatgggacccccacaatggccccgctggagacgccagcaccagccctttgggtgagtgtcctgggtccaagggtgggagtgctgggcaggcctgtgtagtaggcctgtgtaccctgagccccagcccctgaggcaggaggaggaacaggaacaagttaggctagaacccagcccactgttctgcacctggggcccttttcacccaagctcctcgtttcccttcacctaagtttagcagctgctgcctctgccttgggaacctgtcatgggattgaggccaggcctggtgccctttgatcattgcaaaggctcccagtgcctgttggtgccagagccacggaaagccagaaaacaaagaatgaggatgtcaggtgggaggaaggcccgggtgccctgtggcccttcagcctcccagggtgctcttaaaagaaatatttaatgcatctgaaataaactttacctggaaaacatttactgctagttttagaatgaaaaatgtatttttaggtcaaaactgttattcgatatgtttgcagtcacagcccttagctaaatcacaaaccacggattcttttataaatctttccaccatttctggaaagaagtactccttggctttgttattctctcctcccttattaattaaaggtttaactttgaatttaggcttaacttctctgtgcttcctgtattgcttttgaggcttattgaccagaacgtgtgacttgcacaggagccagaatcatcccaaaggttagtagaggttggagaaatatgaggaccagatatttataccagtttagttgcaaagagaccctgccttattcaccttgcattcccatttccatttgtcttaagatattttttaatttccttttgatttcttctctgacccattggttgttcgggaacatgttgttaaatgtctgcatatttgtagatttcctgaaattactcttgtgattaatttctagtttcataccctcatggtggggatcttctctttgcctcgtttgtggagtcttcagaccatttgctcacttgtaatagttcagctggctttaccacaaagtaaaactaccttttctatcttcccttgctacctcttgtgctaagctgctgccatactgttgtcctaatgaccacaccctccaggatgcagaggtggttttatcttttaggagccatcagggccgtggatgtggcatgccatccacctctgtgagtaagtgcaccacacctgtcagcatgcacagtgggtccgtatagaggcgcgagtcctcttcaccctccagctgagaggattctgtatctagtttactccgtgcagcatcctgatgatgacaagaggagctggaagtgtttctgagacacaattcataagtttctgacagcagggcctggttaaacgaaccatggagctgtcttgctgagaacagcactgcccacgggaaagtggacaggtctgtgcgcttgtgaagggaacaggtcacgtacactaaaggggagcgcgggctccagggaggattcctgagtattcccattcatgtattctctctgaattgagtacccatacacagggtgtctgcaaagttggaaaccaggacacacctacttttaaactgttagttacattttcaaatgctatattcaacgtgttttcaggcgaatacctaggtaatgagtataattattaaattgaaaaaaggtactaaagacagagtgtccaaaaatctagaaacactggaaaaaatagtccatttatagcacgttttcatatgagcaattggacgtttgctttaaatttaggtatctggagactgaccaaaaaaaaaaacattaagttaattatttgaaaagtttcaccactttggccaggctggtctcaaactcctgacctcaggagatccatccgccttagccttccaaagtgctggaattacaggcatgagccactgcgcccggctgagaatttttaaaaagggagaagaaactgtaggctatttgagtgttaactgctaagaagaataaattaaaacagggagtggggctaggtggtattggggtgagctggagtgttgagatgagacggggcagtcaaggaggaaggtctgaaggaggggagccagcctgcagggttggtgtgagcactcccaggagagctctgtgttttcacctactggggacggaggactgtggtcaccaaaaaaacccagaccacgtccagctcggccctggcagcttgctctgatgtcgcagcacttctgtgtgcccagttttctccagcaggcccttccagcaccagtgctgttcaccctggtcatgatagcttttatctttaattaattcgttgacagcatgtgttgatatacgtatacgttgtggaatggctgaatcaagccacttaacatgcatcacctcacatatttagcatttttatgcgatgaaaacacttaaaatctactctcatggtgattttcgtgtatacaatacagtagttccccccacttatctgtggttttgctttctctgatttcacttacccttggccattcacagtccaaatatactaaatggaaaactccagaaaaaagcaatttatatgttttaaattgtgtgtcattttgattagtgtgatgtaatctcacaccttctcgccttgtcctgcctcatcccacgggggacgtgaatcctccctttgtccagcatctctgtgctgcacgcactccctgcctattagtcacttaggagccagcctggtcatcagattgactgtcacagtatctgtgttcaagtcacctttattttactgaataatggctccacagagcaagagtagaggtgctggcaacttggatacgccaaagagaagccggaaagtgttttctttctttttccttttttttttttttgagatgaagtcatgctctgtcatccaaactggaatgcagtcacaccatcttggctcactgcaatctccgcctcctgggttcaagcgattctcctgcctcagcctcccaagtagctgggattacaggtgctcaccacctcacctggctaatttttgtatttttagcagagacggtgttttgccatgttggccaggctggtctcgaactcctgacctcaggtgatccgcccacctcagcctcccaaactgctgggattacaggcatgagccaccatgcccagctagaaagtgctttctttaagtgaaaaggtgaaagctcttgatttcataaggaaagaaaaaaatcatttgctgaatttgctaagaactccagtaaatacagtaagatattttgagagagaccacattcacataactttattagagttagttgttgttaatttcttactccaactaatttataaattaaactatattgttaattgttgttaatctcttactctgcctaatttgtaaactaacctttatcatagttatgtctgtataggaaaaaaaaaaaaaaaaacataatacaggtacagcatcccaaatctgaaaacacacaatctgaaatgcttcaaaatccaaaactttttgagcagcgacatgacactccaaggaaatattcatcagagcgttttggattttggattttcaggttgggggatgttcaactggtaagtataatgcaaacattccaagatccaacaaaaatttgtaacactgctggtcccaagcattttggataaggtatacccaactggtatatatagggttctgtactatttgtggcttcatgcatccactcggcatcttggaatgtaccccttgtgaataacaggaggaccactgtatattgttattaactgtagtcaccatgatgtgcaatggatctcttgaacttattcctcctgtgtagctgaaactttgtacattttgaccaacatcttcccaaacccctgaacctctggccactggtaagtaccattctcctctcaccatcctgctctttgcttctatgagttcaacttgtttacattccacatgtgggtgagaacacgtggtagttgtctttctgtgggtgcgttatttctgttagcatactgtcctccatgttcatctacgttgtcacaaatgacaagatttccttctcttttaggctgaatagtattctattgtgcactctgttataccacattttccttattcattcattcatcgatgggcacatagattgattctgtatttggctattgtgaataatgctgcagtgaacctgggagtgcagatctctctttgacatactgatttcatatcctttggatatatgctcagatgtgagattgctttatcatatattctactttcaattatttgaggaatctccatactgtttttccataatggttatactaacctacattccaccaatagcatatagggttttctttgctccacatcttcaccaacactcattatctttcctgttattagtaatagccattctaacaggtgtgagctgatatctcctcatgcgtttgcattgccctgattattagtaatattgaacatgttttcatatacgttttagttatttgtatgtcttctttggaaaaatctttattcaagttctttatccatttttcaatcatgttttttatttgttttcttgttattggttctttgggttccttgtatgttttggatattaatcacttatcagatttacactttgcaaatattttctcccattttgtaggttgtctcttcactccgctgattgtttcctctgctgtgcagaagctttttggcttgatgtaattccctttgcctgtttttgcttgtgttgcctgtgcttttagggcatattccccaaatcattgcccaaaccaacatcatggagcttttcccttatattttatctagtaatttcatggtttcaggttttatggttaagtcattaatttattttgagttgactttttatgtggtgtgagatgaggatctaatttcattcttctgcatatggatatccagttttcccaataccatttattgaagagactgtcctttctccatcaacttgagttgatgttatgaagttaactgtgagcttttcatatgtggtctttattgtgttaaggaacattcctttatcatgaaaggatttcaattttgtcaaattcttttcttgcttctgttttctgtctaaaccatatgacattatcatacagtttttgtccttcattctgttgatgtggtaatcacattattgatttgtgtatgttgaatcatacttgcatctgtccttgcaaggacagatcccacttggtcatggcaatttcgtttggatatttggccctgcccaaatctcatttggaattgtaattcccagtgctggaggtggagcctggagggaggtatttggatgatgagggtgcatgcctcatggcttggtgctgccttcacgatagtgagttcttgtgagatctggtcatttaaaagtgtgtggcatctccccctgccgctctatctcacttgctcctgttttcaccatgtgacatgcctgctccccttcaccttccaccatgattgtgattgtaagcttcctgaggcctccctagaagttaagcagatgccagtaccaagctttctttaaagcctgcaggaccatgagccaattaaacctctttataaattactcaatcttagatatttctttatagcaatgcaagaatggactaatacacatggtgaatgatttttttaatagcttgttgaattcagtttgctagtattaatattttgttgaggaatttggcatctacgttcatccgggatattgacctacacttttattttcttgtagtgcccttgtctggctttggtatcagggtaatgctggcctcataaagtgagtttggaagcattccctcctcttcaattttttggaagagtttgaaattgattggtattagttctttaattggttggtaaaattcagccatgaagccatctggtcctgggattttttttgatgagagactttttattactgacttcgtctcctcacatttattggtctgttccttttttcggtgtataattgtccacaatagtctcttacgatacttcagtgtgtctgtggtatcagcggtgatatctgctctttcattactgattttatttgagtcttctctttctttttttctcagtctagctaagagtttgtcaattttatctcttttcaaaaaaccaagtctgtttttttggccttttctattgtttttctagtctccatttcatatacttctattatgattgttgtcatttttttcattctgctaactttgggcttagtttgttcttcattttctattttcttgatgtataatcttaggttgtttatgtgagacctttttttaatgtacgcatttattaccataaactcctctgttagaactgttttgctgtatgtcgtaagttttgatatgttgtgtttctggtttttttttttttgtctcaagatagtttttaatctcccttttaatttcttctttgatccattagccgttcagaagccagtgttgtttgatttctacatatttttgaattttctgaaattactttttgatatggcttgaatctgtgtcctcaccaaatctcatgttgaattgtaatcctcaatgctggagatggggcctggtgaaatgtgattggatcatgggagtggatttcttatgaatggtttagcaccatcttcttggtgcttttctcatgataatgagtgagttctcatgagatcttgttgttcaaaaatgtgtggtacctccctcttctctctcttgtttctgctctggccatgtgatatgcctgctacccctttggcttctgccatgattgtaagtttcctggggcctccccagaagctgagaagatgccagcattatacttcttgtacagcctgtggaatcgtgagacaattaaaacccttttctttctaaattacccagtctcagatatttctttctggcagtgcaagaatggactaatacagaacattggtacataggagtggagcattgctataaagatatatgaaaataaggaagcagctttggaactgggtaacaggcagaggttggagagtttggaggctcagaagacaagaagatgagggaaagtttggaacttcctagagactagttgaatgtttgtgaccaaaatgctgataatgagatggatggtgaaggccaggttgatgaagtctcagatggaaatgaggaacttattgggaaatggagcaaaggtcacttttattataccttagcaaagagcttggctgcattgtgcccctgacctagggatctgtggaactctgaccttgacagtgatcatttagggtatctgatggaataaatttctaagcagcaaagcatttaagatatggcctggctgcttctaataacctgcgcttataagtgtgagcaaagaaatgacctaaagttggaaattatatttaaaggggaagcagagcataaaagtttggaaaatgtgcagcctggccatgtggtagaaaagaaaagcctgttttcacaggaggaattcaagcaggctgcagaaatttgcataagtaaaaagaagccaagtgctattagccaagacaatgggaaaaagtctccaaaggcatttcaaagacctttgcagctgcccctcttgtcacacaggcccagagggttaagaatacagaatggtttcatgggtcagccccagggccccactaacctgttcagcttctagacactgttccctgcatctcagcagctctagtttcagccatggctcaaaggggcccaggtatagctcaagctgctgcttcagagggtgcaggccataagcctggggggtattcacatgatattaagcctgcaggtgcacagaatgcaagagttaatgcttgggaggctccacctagatttcagagactatatgggaaatcctgagtgctcaagcagaagctgctgctggggcagaacctctactagaacagtgcaaaggggaaatgtggggtttgagccttcacactagtccccactggagcactgcctagtggagctgtgggaagagggccaccatcctccagaccccagaggggcagatcctggcagcttgcaccctcagcatggaaaagccacagaaacttaatgccagtttgtgagaacagcctcagggactgagccttgcaaagccactggggtggaaccagctgcccaaggccttgagagtccacccctcacaccagtgtatgctggatgtgagacatggagtcaaaggagattgttttggagcttttaagatttgataactgccctgctgggttttggactcgtgtggggcctgtagcctctttcttttggctgattttttgccttttaaagtggaaatattttacccactgcttgtacctccattgtgtcttggaagtaaataacttctttttgattttacaggcttgtaggtggaagagatttgccttgtcccagatgagacttgggactttggacttttgagttaatgctggagtgattttggactttgggggactattgggaaagcatcattgtattttgcaatgtgagaaggacaagatatttgggggaccaggggcaaaatgatgtgatttgcatttgtgtccccagcaaaatctcatgtcaaattttgctccctgttgttggaggtggggcatggtgggaggtgtttggatcacgggagtggattcctcacgagtggtttagcaccatccccctgaggcagtgctcataacagtgaattttcatgagacgtggttgtttaaaagtgtgtggcgcctccttcccaccctcactctctattgctcctgctctggccatgctcccgctttgccttccaccatgattgtaagtttcctgaggcctccccagaagctcagcagatgctagcaccatgcttcctttacagcctgcagaaccatgagccaattaaatctcttttctttataaatgacccagtctcaggtatttctttatagcaatgggatagcggcctaatatacttctattattgatttctagtttcataccatggtagtaggaaaagatacttgatgcaatttcagtcttcttacatttattaagttttgttttgtgacctaacacatggtctgtcctggaagacattccatgtgtgcttgagaagaatggatattttgttgctgctggatggaatgctctgtatgtctattagatgcttttggtgtaaagagcaattcaagtctcctctacccagtgttgatgtcccaccagtatttatatgttgaaacctcattactcatctgtcagtattaagaggtagggccttttggaaagtaagacatgaagacttatgaatgggattagagcctctacgaatggtattagcacccgtataaaagagattgaaggaggcatgtttgcccgtttccaccatgtcaggacacagcaacaaggtgcaatctatgagaaatgggccctcatcagacactgtatctgctagcaccctgaccttggatttcccagcctctagaagtttaagaaataggccaggcatgggggctcacatctgtaatcccagcactttgggaggccgaggtgggtggatcacctgaggtcaagagttcaagaccagcttggcccacatggcaaaaccccatctctactaaaaatacaaaaattagccagatgtggtggtgcatgcctatagtcccagctacttgggagggtgaggcaggagaatcgcttgaacctgagaggcggaggttgcagtgagctgagatcacaccactacactccagcctgggtgacagagtgagactccatctgaaaagaaacaagaagtttaagaaataaatttgtgttatttacaaattgcctagcctaaggtatttttttaaaacagcctgaacagactaagacaaaatttaatttttaaaaaattttctgcctcgcttacctgtctattgttgaaagtggggtattgacattcactactattattgtattacagtttatctctgccttcagatctcttaatttttgcatttaggtgctctgatgtttggtgcatacatacacacacacaattgttatgtcttcttgatgaattcactcctttattatcatataattaccatctttgtcttttttaaaagtttgacttgaagtctatttaaactgatgtaaatatagctatccctgctctcttttggtttccatttgcatggagtgttttttccatcctttcgctttcaacctatacattttttaaatctgtcgagctcatctgtgtcttttgattacagaatttaattcatttacatttgtggtaattattgatagataaggctttactacttccattttgttcattgtttcctggttgttttgtaggtccttctttcctttgattctttacttgtgatattttatgtataatctaccattttgctgactatacttcttagtttaaggtgctaagagtacagtaattcataaaatagagccaagtctctactcaaacttaaggtgagagagtgagagagtgctttctgaattcctttctgcagacttaggatttaaatctgaagtgagcacagcactgtgggttctatgggtgatgatagacaactactcggggatctgagtgggatcagtagtgatgcagtgaaagatgtgtgggggctgtgggggcatgggagcctcaggggtgttcagggccaggtgggctcctcgcattccagcctcaggtccctcaatcctcccaaattgctgacccctgtgaaataaggatgctgatgctaggagagatatctccaggatctgacatcatagcgtcctgggcaaaaagctcagttcctcacactcaagtgaaaggagagtgggtcagctgtggtggtcaggtgtatgtggtatagagtgtatgtgtgactgtgtgtgatatggtatgtgttgggggaggggatgtgtgtgggagtggtgtggtgcgtgtgtgtacatgtatggtgtgtgtgtctatatggtatggtgtgcatgcgtgtgtggtgagtacatggtgtgtgtgtgagatgtgcagtatgttgtatgttgtgtgtgaatgtgtgctgtatatggtgtgtgtgtgtgtgatacatcatgtggtgtgtgtgcatgaatgtgtggtgtgggtgtcagtgtgttgagcatgtggtgtgttgtatgatatgtatggtgtgtatgtttatagtgtatgtggcatgttgtgtgatgtgtgtgtgtttagggtgtctaaggctgtgtagatgcagaagctttatagatgctccacagatggctgtctttgctcaccagctctcttagacccctgtaatctttcttttattgtattgcaaattacattgcccaccaagaatgtcacaatgggcagccatgggcagtgattcccagcccttatgaaattgttacgcctactcagtacccctctccttctttgcttatttgtcactttaaaatgaaatcagattcagtgagctttgtgtctttaggggaattctcagtgaagtctggaaacccttccccctcaggttttccgaccgctgcttggagtttctggtatgaagtgctggtgttctccgccaagcagcaggtgcatctgtaaattactgtgggatgttaatggctatatactttcttattcattacagctccagtccccaaaaggcaaaaatgtgaccactggactccctgcccatctgacacctatgcctacaggttactcagcggaggtggcagaagcaagtacgccaaaatctgctttgaggataacctgtaagtaccagcgtttagaaggaaaataaagcgatcctactgattcttgccccttccctgaggctgaccaagcagcagttctgcccacaggagagaaccatatgtcgttggtctcaggcaaaaggctgagagcatccaagtggaaatgagaaagctccgctgtattcaccagggaaggagctgattgtctctaatggctgtatgtgtcttgtgtttaatggttttacggtttcgtttgactgcagttgtacttaggatttaaatctgaagtgagcacagccctgtgggttctacgggtgatgatagacaagtactctgggatctgagtagggatcagtattgatgcagtgaaaggtgtgtggggcacgtgggggcatgagagcctcaggggtgttcggggccagatgggctctgaacaaagttagactactttaaaaagcgaagttagactactttactttgaatatgtggcaaagtccttcaaagtcatgggaacatgaaaactcagccgatagtttcttcgttttattttatgatcctcaccttcctggattaaagcaggtgttgtttctgtttgcagtccatactttacacttcttcaatattttgggaaaatccatataagattgatattatttcttctttaaatatttggtgtgatttcccaacaaagtcgtcctggcctggagggttttgttttgaggtttttaactgcaaatttaattgatgtaataagtacagcactacttaagttatctgtttcttcttgagtgggccccatttttatttttttattatttatttattttgttttagtgcttccttgatttacagcatagctaaactcagccgagtctttctttgttcagactgaaatcagccatttctctaaagagagagttccttaatgggatgtggtatttagaaaccaagatctagacactcatgggcccttgatagggttcctcctaagcacttttagtggacagaaccaagcaatgcatttgtttctaaatcatgaatttacgttagcatttacaattcaaattcaacagtgcaggagtcttacccccttaagttcttcgattttacattttaactcttcccttacactgagaatcttggttcctagtactattaaccttcgccttcaaattacaataccaagactactaacaatacaactactgagtgaagttaaaaaatgttgtttgcagttcctcatagatttaaaaatattttattaaggttataaagagtcagatgtctatattaatcaaggctctccagagagacagagccaatggcagtgggaggtaagaagagaaaggaaagagtggatttatttattagagaaattggctcatgcaattatggaggccaagaggtcccacgacaggccatctgcaagctggagaccttgagatgctggtaacatggctgagcccaagtactaaagcctcagaaccagagaggcagatggtgtaattctcagtttgagaatcaataggagatgggaggtctgctggtatcagtcttggagtctaaaggcgggggagcctgaagttctcatgttcaaggtaggagaagtagaagggtgtcccagttccagcagaaagagagagagaggcaaaaggggactgaagttgtcttttttttttttttttttttgagacagagtctcactctgtcaccaggctggagtgcagtggcgccatctcggctcactgcaacctccgccttccaggttcaagcgcttctcctgcctcagcctcctgagtagctgaggctacaggcgcacaccaccatgcccagctaatttttgtatttttagtagagacagggtttcaccatgttggccaggatggtctcgatctcttgacctcatgatctgcctgcctcaggctcccaaagtgctgggattacaggcatgagccaccacacccagccaaagttgtccttttataaggaacccattcactcctgtgataacagcattaatccattcaggagggcagagtcctcatggcctaatcacctcctaaatgtcccacctcttaatgctatttccacatgagtttgagaggtaacaaacattcaactcatagcaatgaccaaagtcatatgaaataattactttccctgtagttattttacattgaattaatttccatttgctttcaatgctaggtttgtttttctttgggtttcatttaatttttgaatatatatttatttggttcagaaatcaacattatgtttgaatattacatgtcccaaaaaaggaggctcagagaaatcttccctgtattctccaccttttctccccacctcttgttcccatctccattaattttttaattagtttttgatttattcttccagtatttcttaatggcaaaaaataagctatatatatatataaaattaatacatacctatgtatatttttatatacaggtatatatatgcatgtatacatgtgaatatatgtatatgtgtgtatgaatatgtgtgcatatgtgtatatacacattatacacgtatacactcatatgtacacacacatttatatcctttcttacataaaaggtggtaaactctatacacagttatgaccttggctttcttcacttaacagttaatagagattactccatatcagtacatcaggcttttcctcatttcttttattgatatgtggtattccatagcacggatgtgtcatagtttattcaactagttctgcactgataggcatttctgatgtttgatatcttttggtattaccagtaatgctgcaataaataaccttatgaatatatcattttgtaataaattatgataaggcgagcagttgtgtaaccaccatcctggctaagaaatagactatcactagcaccccataagccctctgtgtaccccttctgaaatgcagcttcctctttccttcctgcccaatggtaacctggattttttttggtggtgatttatttcctcacttttcttggtagttttactgcctaagcatgcattgcaaaatactgttatttaattcaacacttgtttaatgttgtctgttttggactttgtataagtggaatcataaaccaaatactcttttgtgtctgagatttatccttcacgttggatgtagctgttgttcttagatgttcattgctgtatgatactgcattgcatgaatatgttacagttatccattctattgttgaatgacatttgagtcattcccagtttggggttattatgaacagtgctgtttatgtctcttggtgcacatgcacatacatttttgttgagtgtttttttgaagaaggattctcacaactagcctcaaattcagtgatactctagaaaaattcctaagacccaataacaggttacacttataggtaagttttcttacagcaaaagacacagagcaaaccctcctgcatgttctgctgatggtgaattcttccagtttatgtttctctgaaatatctttacttcaccttcatacctgaaaaatagtgtggtctgctgatagtgaatctttccagtttacgtttctctgaaatatctttatttcatctttgttcctgaaaaatacttttgtaggctgtgttagccattactttctttcagcacattcaaggtactattccactgtcttctaggttctatattttccttttgagaagtcagctgacagtcttattgtcgctgctgtgaaagtaactgcccattgccctcgtccccgtcaccttagagattccttgtctggttttcaacatttgtactccaatgtgtcttttgttgttttatcttctttggagtttttttgagtttcttaaattggtaggtattgaagtctttcatcaaatttaacaaattctctgctcttgtatcttctgcccattcactttctcctcttcttctgagattcttaatgaaacatatattagaccttatcactactatagtctctagagcctatagtctattttgtattttccatttgtttacctctctgctctttatcatggacagagttgttttccattcactaattctctcacccactgtacctaatctgctgtcaaacccattcaatcactactgattttaggttactatattatcttagttttagaaattcattctggttctttttaaaatcagcatgtcagttttggtacttttcagttctgaaatttttaattttatcaaccatgtttttgaatacattatagttaaagtctgagttggataactctagcatttagagtgcctgtgagtctgtcactattatctactgttttctgctggttccattgtctcttgtgtgcgttggcctttttcctcacgtgtcaggtttcatttgatcctgcacctgttttttaaaaaaattgaggcatgggatgatatcttcttctgaggaattatctttgcttctcccagggacctggaacctttagcagaacaggatgacctgaataagtgttaaagattttctgggccacctagttgactaaaaactaggctgaagtttatacaagctctgatttttttctggtttgctctcactttcaggattcaaccctttgtgaccccaggccaaataagatgtgggagatttaacatggccctgaccctggcttccaacttctgttcccttggctcacatggttgtcagaagggctgttcacttccttacacaccttttctggaatcagcaaattctccttggttaaaagtagcttttaaacgctggacttaccaacctgaaatttagtcttctcccagatcttggcctgggaaattcttaactaccttatttggtctctaacgtatacaaccagatctttaacaacaacagcaacaacaaaacttgcctcatgttttctgcttttctccatgagaaagtcggtttagattagccgattttctattatcagaaatctctttctgcttcaagttattatggaatagtctctaaacctgtcaaaaagcactaagcctagaaaactcataggggagtttaggtaaaggtgtcaaaacaaaatattaaagttccgtgttcgctattccaaagcatggaaaaaggaggaagccttccaaattattttcataaagctaacatgtcattgattctgacacttgacaatgggaacatgcacatatacaacatgcacacacacaatttctgtgatcttcagcaataattaccatctccaggtaagtcatttagttttcctgattttagggcacaatcctcttgaatttggcatttcatattctacaatttaaaggttaaaaattaagtgacatactcaggcatggtggctcatgtctataatcccagcactttgggaggctgaggcgggcagatcactggagcccaagagttcaagaccgccctgagcagtatggcaaaactccgtctctacaaaaaaatttttaaaattagcctgttgtagtggtgcacgcttgtacttccagctacttgggaggctgagatggaaggattgcttgagcccgagaggcagaggttgcagtgagccacgattgcacaactgcactccagcctgggtgacagagtgagaccctgtctcaataaataaatagataataaattaacaataaagtgcatctgtgaagagcctgagctaaataaatgttagtttttcttccccctagccatttgtctaaattataagattgaatgcagtgtccaggtcccctgagagtccaggtcccctgagggactgagtctgtagacactgagaatagatgtgtgtggatgaacatgggggtggcggtctcgggagctgcaccaaggcgaatgcagactttcaaggaaaaggtgggggacagcagatgagactgacatttggtcaggcgaagacttcgcggagcggggagagtcgcacgcctcttggtacttgactaatgcttagctccatttcagacttatgggagaacagctgggaaatgttgccagaggaataaacattgccattgtcaactgtaagttactaaacattttctttaaacttctctaaaagctctctggtcagattttcaaaggtaccttgggttttcgagacttttgcgcgtgatttagtctaggtttgtattttaatgcattttaagattatatactcaattatttttacaagtctcacttcacagattatttgtggttctaacaacaaataaacaactgaaaaccaaatatagactttattttaaaaaaagaaaaaaacagagggataggccaaagttagggttaacaccagaagggccgccaagggggtgcagcctgtggtcctggactgagcctctcatttgctcccagagtcccagtgtctgctcaggggctgacaccatagaccatctcatccttctgtgtgataaaagccactgcaacctcgtgggaaacaaaacttggcctttctcttaggtctggaataaagctctctcacagttgcctttgaggggcccagaggagaaggaaagggtttcccacaacgtccctgtgagtgagtgggccgcatagccccgagacgtgagggctgtggaagtgaagataaaatgctcccaatctgacagccctgaaggaggctgtaaagtaggaagtgggcaggctgagggggctctggtgtttctgtgggatgaggcgggtgggcctggctgagggggctctggtgtttctgtgggaagaggcgggtgggcctggctgagggggctctggtgtttctgtgggatgaggcgggtgggcctggctgagggggctctggtgtttctgtgggatgaggcgggtgggcctggctgagggggctctggtgtttctgtgggatgaggcgggtgggcctgagtgaggggtctctggtgtttctgtgagatgagttgggtgggggaggtattagtgttccatcaggtgtaacccaaagcaaactggaagaaagttctagcacagcttccagcactttcctttgacctggttttggggactctcctcaaggggcccgccctgtctctgcaggctgggtcattacatcagtggtgtttgctggagatagacagggaagaaatatttccttccccaggccctggtgccacaagtgcgccctagttctgtgaactttcttttaaaataccatttcttttattttcagatgtaactgggaatgtgacagcaacacgatgttttgatatgtatgaaggtggtaagaaaattttttctgttaaaattcaaatgaattttaaacagaaaattaagattaaaaagcacaaagaaaaatgtcaaccatttttattttgtctactagaaaaacgccagcagctctcctgagtaatctagagtggtcttatgtagatcctcttaaactctaattgaattcatagaacatttgaaggcatcatctagaaatgtcttttcttctgttagttttcctcagtctttctctttttagctctcatgatataataagaaagagaaaaagccttttttttaaaaaaaaaaaaaagccaaatacattatatgtaaaataaagccaccagcatccagccctaaatatcatcatcctttgaaagctgtcacgattactcctggtgactcacagtgctctgctgggctcagggcaagcattcccggaacccacgggtgcccagtctttctcgatggtctctcctttctaggcactgactcttgactgcagttgttggccaggatatactatcccctcttatttttatatatcaatgagactttcaaaaacaagtttttataaagatagtgaagacgaagaatagaaaacgcctgcacccacccaataagaaggacacagttgtactctgcagttaacctaagcagaacagtaaataatgagccgcagcggtgagtaacagggtttgaggtttacctttattttataaggcatagataagtctcttggcacagacttgcccacggtccacatgtctcgtatttgagttctgtgggagtctctctcctgcacacgtcggtgtgtttgcaaggccactctgctcagtggtcgtggtgtgggtgtgggtgtggccctttatcagtgactacagagaacactccacctgtgccacacaggctgctgcttgttaagagtttggtgatctcatttctaaggagggttttttttttctaccaggggctccacttctcttgtttgttggtcaaaaaagctccttatcttgaccccctttcactactgccctgaacacctattgcaagtgttaggttcttttccttctacgctgtgccactcacctcagatagtccctatggtaccccagtgaatgttcacacgtccagagctagcacaccatctgcagggttgagcagcgagcgctgggacccccaaggattcagaatggacacagaatgcaggtgcaggaggaagcccagcacccaaggcagagcctcagtgaacagcaaagaccctaaaactgacttgcatcccccaatagataactctggaccgatgacaaagtttattcagagtgctgctccaaaatccctgctcttcatggtgacctatgacgacggaagcacaaggtgagtgggtgtaggtctgtcacagcggtgggcaagagaagccagctggggcagaggctgccagggtctctcagtgacatcctctggggacaagcagaaagtccaggagcaaagtacttctctaaggaaaaagaatgaaagatcatgacaaaatagatggcatttctttaaaaaaaaattaaatcactaaccacagaagtactagaacctaaatcaaaggagtatttcaaggaatcaagacaaagccactgttgaccataattaggacagacaaactaacctccggacagaaagcctaaacccagggtggcattaatagttacagcaatgtgaaaggaaattgagataatttccctatagaaagaggaaaagaggctgggcgcagtggctcacacctgtaatcctagcacttgggagaccgaggcaggcggatcacgaggtcaagggttcgagaccatcctggccaacatggtgaaaccttgtctctactaaaaattaaaaaattagccaggcatggtggcatgcacctgtagtcccagctactcaggaggctgaggcaggagaatcgcttgaacccaggaggcggaagttgcagtgagccaagattgcaccactgcactccagcccggtgacagagcgagactgtctcaaaaaaaaaaaaaaaaaaaagaggaaaagaataaagaaatacacacatacacattcaatactgtactagaagtggatgtagctcagtgcctctcagagtgtgtcctactaagtaaaccaaacctgtgtctttgctgcagaatgtctaagaaccttcaaagtgcttatttgtgtggtgaatttcccagacagggctactgaccacagcatttcccaaatttatcagattccttttttcatggagcatcttaccaaactgaagttccttggcacatactttgaaaaattctgacttaactcacttagaacaatctaaacttaactgtttactttcctgtctaccctcctgtcacttcctctaaatcttaatgtttgcagtggcagtattgttttacatttctttttcctttttgatgtggacttttctgattatgaaaagggggcagttttggcatttgctttcatctttcagcaacttctctccaccttattttgtggtcactaaacaaggggcagagcaatagccgaaaattgtattggctgagtgtgagcctgagattgaaccccaaagcacaagggctttccagaattgagaagtagaattctgtgccccaaactggggcctaaaatggctctggatgtccaatggttaactagaaatgtgacattctcaagaagcatgtgtgcctcttagctgccactgtgtgtcatgcactgcagcaggagatgaatgtgtttagaaacctccatccaaggatgcacagcgtaacacatccagagcagagttcctctcctctccacgtctccctgagatgctcacatgcttttccctttgtcctgcagactgaataacgatgccaagaatgccatagaagcacttggaagtaaagaaatcaggaacatgaaattcaggtctagctgggtatttattgcagcaaaaggcttggaactcccttccgaaattcagagagaaaaggtgagtggttttaaaatgtcccttcccaccaatggtgagtatagtaaatgctgtgccttgaaaacgttcctggtgggttataactccgtctccaaacataagagttgtgtcagctgtttccatgagatcagcattagatccggacagaagtttcaaacttctccaatctctttcaaagtagaaaattctgaatgggctgttggtattggtttttcaccatgctgcagccaacatggtctgtcctgggcctctccttccttgggcaggaggtttacctccccaagctcctgctatggggaaagtaagagagctcacctcttaggatggctgagagcatgaacagacatggtgaatgcaaaacactcaaaacaggctggacaccaaatcaacactgcacaaatctggcttccattgctgctgctgctgctgtactaactgggcacgtgattgattctaagtccctccctttatggcctttatttatcaaagagaagtaaagagcaaaagaatggcgttctcacttattaaccactaagtctcctgtgaaaattccaactgagggtttgcaaaatgtgtgggagtaacaagctgagcatccgatgacaatcacaacatcctggagaatttcagagggttctgctctccaggaaaagatgctgcagtaaccggtgctgcagtaaccggtgcagaagaggaggaaattgtgctgcatgaccaaggcgcgagacttccccactataccttctgaggataagggcctcctttccacttagccagaaattcccagaaagcagagatttctacatctccagggtgtgcaataggccgcttctgatttcaggctctgacatttggtcccagtctgcctccttgtgctgtggatacgggtctgggaagaaagacaagcaacagaagcagctcggcatcttcttgttgccatgaccacctgaggtagaggagaagggggctggataaggtgcgacttcagcgcaggccacacaaccagacaacttggaactggttcccaggaaaccctagaccttctgtgaccccctctagtctcatgttccggaggcccggaaaccatggttattttagcatgcatctacacaagcatgctttccccttgtgacttcatgttcctctagagccaggaagccagccctgcagaacgtgtagggaatgtttcccggggccctggcctcgacccctccttgcttatgactgtgcctgggcacttgcatgcacagtgagccctcatgggtctgccctaaccgagaggcactccctgagctctgattggtggggctccttgggccccaccactgcctggacccacactgagggcaagctgaaccagccacacaatagtgaagccggggcttacggtcctgtgttagttttgcgaggggacgtcgtgtgatcttaaacaagtcacgtcacctctctgggctccagctttcctgcctcctccagggccagcagctgtgctgcagtgtgcaccccattctccccgggatttcctcaggctgaccctggggagcgaatactgggtccccatctctccgatcccttgtgtgatccatgccacaggctgtcgtcttgagaatgtccaggctttatccagctggctgtgtggtcttggaaagttatctaaccctctgtgctcagaatcatcacctgtgagaggtgaataaagatagttcctgccacagaagggctcctgaacatgaaagaagagaaacacatggatctcagagtggagtcctgtaacccagaacagctgggccttcctggagctccccgggtcctgccccaccagcccaccccaaacccagatccctccgcacagcttctgcaatcaatgtctctcccaacttgggtctccccaaaaaccagtgatgtccaggctgtgcgcaggacaactgaaccagcttctcagagggtggggcctggcctggagattctgatgcacggggaagggagcctccttgcgtggatctccaggagaaaatggaggccctggtttcacatacacacccacacttccccttaacagcgtcctccgacttctctgctccttccccggctcttaccctgttttcctcctcctctttccttccttcccagttccacagtctcttcagcatctccaggggccttgtcccaccttatctaaccaccccagcttatttaactagcaagggcggcggtgagcaggtactcctggcagcccgggcgttgtgccacacagggacccccccatgcacacgagcgtctgtggttattattactaccaatggtgcggttctccagctgatttatgagagtgtccagactgtaccagaaaggctggcatgtgaggctgaaatcctttttaactcaaatgttaacatctcatcaaacaggttcttcattaatgtttaagtcgtagaaaacaaaaacctcattggaattgcacagaggaagttgtagtccttccttatgatttccttcatatgaaagagtttctggagcaggagaaatcaagaaaaagactggacgtcaaagccagggctgagtttagagaattggaatgtgtttggaaatggtggctccaagtgaatttcaggaaaatgcctgttttgcccacctgtgtcagctaaaagttatccaagttactacaggagtataaagacgagacctaaacacagcaagcagtcagtgctggagagttactagaggttctgtggtttgggggcgctaaaggatgtttgctcaaatgttggtgaggtctggactggtagccagggcttcaagacaggtcttaccgagaccttgagagaagtgccactggaggaatcatttgtgtctgtgttactttggctattcagacttgcaggtggtgtatttccctaagggtggtgtacccatgttgggagggcctcctgagtcctcaggggtctccccagccccatgttcactcccactccacctgctattccaggagtcagctttctaggcacagcgcctgggccactctcatgcagagcctttaatgaccccactacctgctgaattgaattttaaagtataaggaacttcaaagattattccatccaacctcttggttttataggaggaaggaaactgagaaataaataaggacaggagtcttggaagtgagggtaacctggttcagatctggacttggccaccccgactgcatgacctgagtttggcacttcataggcctgcgcctcttctgcaccctgaactgtgggtagcggagcctgccttgctccctgtgtgtgtgacaagcatgatgcagcaggaggagccatcattctcatcgcctccagcatggtctgagtcttgtctctggtgatcctaactggagcacagacccttgtcttcagccccactcagcccctcccatgctttgtgtgctcaacactccagcaaagcctcatgagtggctgctcttaccataccctgcagcgctttgccactatgctggctctgttcaggtctcgtctttatattcctgctgtaactttccacatgtggacctctgcacatgcctccctccatgcagggggtgccttcacaaagccttaaagatccacctcaaggctgtttcttctgagaagcctctctggccctgccactgctgcccgtaatgcccatggcattttgtaccttccctgagaaagaaagggaagggaatggaaggaaggaaaaagggaagggaggggaggggagggaagggaaggtgcattatcacattagaaaggaagaagtacttaggccaggcgcagtggctcacccctgtaattgcagcactttgggaggtcaaggcaggcggatcacgaggtcagaagttcaagaccagcctggccaacatggtgaaatcccgtctctactaaaaatacaacaaattagccaggcatggtggcgggcgcctgtaatcccagctactcaggaggctgaggcaggagaatcgcttgaaaccagaaggcagaggttgcagtgagccaagataatgccactgcactccaggctgggcaacattagcgaaactccatctcaaaaataaataaataaataaataaataaataaaggaagaagtaaaactatttctgtttgcaggtgacatgattttatgtatactaggctggtgcaaaagtaattgcaccaacttaatggaaatcctaagaggtccactaaaaaactatttgaacttataccaagtttagcgaagttgcaggatacaaaaatcaatggaaaaactcaattatacttctctttacttgcaatgaacaacctgaagatgaaattcagaaagcaattgtatttataacagtatcaaaaagaataaaattcctaggaataaagttaacgtaggagatgcaagactaatacactgaaaacaataaaacatgttgaaagaaattgaggacttaaaaaaagatattccatgttcatgggtcagaaattttaatattgttaagatgtcaatactttcttaattgatctacagatttaacacaattcctactagaatccaagttgatatattttgtagaaattgacaagttcatcctaaaattcatatggaaattcaagagactcaaataacaaaaacagtcttgaaaaagaacaaagttgcagggctcacatgttccaatttcaaaacataacacaaagctgctgtgattgagatactgtcactctggcataaagatgggcatacagagaaatgaaatagaattgagactccagcagatgtgcatgttctcacatttttgatcaattgactttaggcaacagtgccaagattatttaatggggaatgaatagtctcttcaacaaatggtattgggaaagctggatattcacatggaaaagaatagacttggaccctacctcataccatatacaaaaattaagtaacaataaatcaaatacgtaaatgtaatggctaacactattaaactcttagaggaaaacagaggcataaatttttgtgactttggtttaagcaatggtttcttagatatgacaccactaacaacaaaagaaaagtaagttgcccttcagcaaattaaaacttttgtccttccagcaaaagaaactatcgagtaaacagacaacctttagaatgggagaaaatttttgcaaagtacgcatctaacaaaagtctaatatccagcatctaaaggaacttaaacaaatttacaagaaaaaatatcccattaaaaagacaaaggacatgaacagacatttatcaaaagaagacatccatgtggccaacaagcatatgaaaaaaagctcaacatcactgatccttagagaaatgcacatcaaaaccatgatgagatgccatctcacaccagtcagaatggctattattaaaaagtcaaaaaataacagatgctggcaaggttgcagagaaaaaggaatgcttttacactgctggtggaagtgtaaattagttcaacctttgttgaagacatgtggcaattcctcagagacctaaagacagaaatactatttgaccagcaatcccattactgggaatattcctaacaaattatatttgttataagtaaaatttaatattcaaaaagcaaaggaatagaaattgttatattataaagacacgtactcacatatgttcattacaaaactgttcacaatagcaaagacatggagtcaacccaaatgcccatcaatgatagactgaataaagaaagtgtgacacatattcatcatgaaataatatgcagccataaaaaagaatgagataatgttctttgcagggacatgtatggagctggaggccattatccttagcaaactaatgcaggaacagaaaatcaagtgtcacacattcctactgataagtaggagctaaatgatgagaatacatggtcacatagaggggaacaacacacaatagaggggcctattggaggctggaaggtgggaggagaaagagaatcaggaaaaataactaatggatactaggcttaatacctgggtgatgaaataatctgtacaacaaacccctatgatgcatgtttacctatggaacaaacctgcacatcctgcacgtgtaccccgaacttaaaagttaaaaaaaaacttttgtgcttcaaatgataccttatagaaagtgaaagataaaccacagaatgggagaaaatatttgcaaataaaggacctgaatctagaatacataaagaactcttacaactcaataataaaaagacaaataacccaatttaaaaatggacaaagttgtgaatagattttgcttcaaagaagatatacaaatggtcaataagcacatgaaaagaagctcaacatcattcattttcagaaaaatacaaatcaaaaccataatgagatatcccctaacacttactaggttggctatgatttttaaaaagacataagaagaagtgctggtgagaatatggagaaattagaaccctcatgcactagtggaggaaatgtaaaatggtacagctactttgggaaacattctggcagttcctcaaaaagttaaacatacagtggccctatgacccaacagttcctcttgtaggtatatacccaagagaatgaaaacataggtccacacaaaaacttgtgcacaaatgtgcatagcaacattatttataatagccaaaaaatggaatcaacccaaatgtttgattaatgggtaagaaatgtatatataaaatatggcttagccatacaatggaatatattcaaatacgtaaagaaataaaattctgatacatgctacaatatggatgaaccttgaaaacaggctaagtgaaacaaacaaacaaacaaacaaacacaaaaggtcacatattatgtgattccatttatatgaaatttccagaatgagaaaatccacagagtcagaaaggagattcgtgtctgcctagggttgggggaaaggagattcgtggctgctaatgggcacatggcttcttgtttgggtgatgaaaatgttttaaaattgaccatggtgatggttgcacaggtctgtgaccatgctaaaaccattgaattgtacactttacattggtggattttactatgtgaattatatcccagtaaagctgttatataaaaagggatatattactggaattccaaggttattaacaaaatgcaccttactttaagcatcaagttaaggtgctctattatctgtgaaagagttgaagatatagaggactaaacccacttcgggatgaatacatatttgctgaggaaggagctatacaaggactctgggaaaaaaatacatacacacacacacacacacacacacacacacacacacacacacacatagttttactcccagagttgaaaactaaacattagagctacactgtccaatatggtagctactagctaaatttacattttatacttaaatttattaaaattaaatagaattcaaattttggtttatcggttgccctattcatatttcaagtacagatgctcttcagcttacatcccaataaaagcatcgtatttgaaaatattgtaaattgaaaatttacatgtagcatacctaacctaccaaagatgatagtttagcatagcataccttaaacatgctcagaacacttacagttgactgcagttgggcaaaatcacctaacacaaagcctattttacaataaagtatggagtgtctcatggaatttattgaacactgtactgaaagtgaaacagaatggttgtgtgggtccttggagtatagtttctactgaatgcattacctcctttgcaccattgtaaagttaaaccaccatgagttggggaccatctgtactccataagcaagtgtggctaggggctactccactggacaggtagattatagaacatgtccatcattgcataaagttctagagctgtattaacacctgcttcaaatattattaagaaacacggtataaatatatgggtagaagaaagaagacatagtgttcaatagatcattagagcaactatagttaaaaatcatctattgtccatttcaaaataaaggagaataatttgaatgttcctctcacaaagaaaaagtaatttaaggtgatggatatcccagtgaccctgatttgatctttacacatgatatggacatatcacattatcacatatactccaaaaatatgtacatctattatatattaatttaaaaattattattaagaaatgtattggaaatcaaacacccagctttggttggagcaaatccaaatctaggaagtggttgtgtcggctcacaactgatactgattaaatacttgtttattagattaatgaataaataaaactcttcttttctctacacagatcaaccactctgatgctaagaacaacagatattctggctggcctgcagagatccagatagaaggctgcatacccaaagaacgaagctgacactgcagggtcctgagtaaatgtgttctgtataaacaaatgcagctggaatcgctcaagaatcttatttttctaaatccaacagcccatatttgatgagtattttgggtttgttgtaaaccaatgaacatttgctagttgtatcaaatcttggtacgcagtatttttataccagtattttatgtagtgaagatgtcaattagcaggaaactaaaatgaatggaaattcttaaagggaatgatgtgattcaagctggaaagagggttgggagaaacagcttgtccaggtggagctatgttatgatcagatcgaagtgtgacccctgtgtggtccagacagccctgcagagagaaaacctttattccattatcaccaagcacctcctagtttccgacagtcatctccttctgctgggagaattagcagcagttcagggggcttatgttatgtccttgttcaactcaacttgagctcttgaactcctcctgtgggcctgtgaatgtattcattcattccacaactctgggtgcctcccacgtctggcaccgggggtacagtacacattccctgccttcatgccaggctgctgagcggggtggggagggaggcgctgctctcaggagggcaactgaacacctcactctctagaagatgcagcagtagatccaagagtccaggatgttccacacgtgctggaacggtgggtcagatgacacatgtgattcggggctaagaaaataagagtcactggggccagcagtcactgccaactgtccattctcacctctttcccgggcctggccccagaagagctaggagactttggtgctgggttaatattccttctctgagcctctatatctcatctgtaagataaaagagttgggatagatgaatggttgccaagcatttttgttggcaggactccttttaaaacatggtgctacatggcaccccgaattccagcattctcacagtaacacactgccccaattctcagtggcttacgacagcattgatttcttgtttgtgttaatgtggccacaggccagccacggctgagccctaggtgtgaaaagccaggctgaaggggtgtcccctgtcaggcatgaaagccagagagggaacagaaatccagcctccaagccccaccaagctcctggcctgatgtgtcagccccagctgctcacatcccatggctccaaacatgggaggcaccaggtcagcgaggccagagtatgtcaaccccttcctcaggggccccagcaaaccatggactgcatggctgtgggctgcgtgacagcccttgtccaaagaagggggtggccactgtgagtggagatacaatgacctgatgactgctgagagccaagcagtgctctggcccagggaggagcatcacccagcctgcaagccctgccctgggcagaggcccctcagggagcctggttgtctgcaaggaaggctgcaaaccactggatggggtcatggctcagatcccagtaggggctgaactgtatcccccaaaattcatctgctgaagtcctaacccccagaatgcaaccttatttgaaaacaggttaactgcagatgcggtcagtaaggatcaagaggtcctagagtagtgtgggcccccacccatcaggactggtgtccctataaaaaggagaaatttggaaacacccacccagagactgggatgatgcatctgtgtgccaagcaacaccccaaatcaccagcaaaccacgggaagctggacagaggcctggaacagggtctgccctagagacttccgagggagcacagccctcctgacacctcgatgtggtacttctggcctccagagctgtgagaccagagacctctgctgtttaagctactcaggtgtggttctttgtgatggcaaccccacaaaactaatataggcccttgtaagtgctaagttcttaggtaggcatagacgtttctgtgtatcaaaaaaggagggcagtacatttttattctggctgaaattgctatgtttttgtagcttcgttgatcttagttcactgtcatggaataggccgcaggggagcttctggccaggcatcgcccggggatccggctttgggctgtgaagttcttgtgatgacggcccctcctacccagtgatggccccttggccctctgctgcccctgcagctcactgctgcgtccgcacccggggcacaggactgtgaattgccattcatttccacttcctgttgatgtttccctacaatgtggtctttagtgtggagattgtcattccatctctgaaggcactgggcactgccagcccccagcccagtcccccaccggtgggcaccacgcaagggggcttgccacatcagagtcacatttcctacgcattgtggaccctgctggttacccctcacacccgccccgtgacagggtcatgatgatttaacctagtggggctggtgaggcacagagaggctaaggaccaaacagccagtctgggtgcagtggctcacaaccaaattcccagcactttgggaagccaaggtgggcagatcacttgaggtcaggagttcatgaccatcctggccaacatggtaaaaccccatccctactaaaaatacaaaacaaattagctgggcatggtggcacatgcctataatcccagctacttgggaggctaaggtgggaggattgcttgaacctgggaggccgaggttgcagtaagcagaaatctcaccactgtactccagcctgggcaacagagcgagactccatctcaagcaaacaaaaaagaaacaaagagccaggtcacacggacaatgacagggtggagttccactccaaggtgcacccgctgctcctgtgctctgctgggagggacacaccccaggtaagaaccctgcttgtctacagcacttcaccattgcctttgtcctgttaattcaggaaagcatttgcttgatctttccttctgtgattggagaggccatgggagagtggatgcatgctggctctggatggctccaggtgctgcaggtgcttccaggtggccaggaacttcatcagcacacagaggcgctggcgctttccatagagtcagcgtgccagggcaggaggcgggcactggggcttctggacttcgcctctttaccaagctgcacactgtaacgctccctgatgtggagctgagggaagagctccgcccagcggctgtgaccgaggcctgagcagcagcatcttttctggccccggcccctgtgcttggatgctgcgtgggacattcattcaccctcagggctttagtgctcagaacgcaagaaccctgtccttgaagtttgcatgcgcaggcacctctggtccttcccagggctgctggtgaggggcgtgcaggagggggatgctgccttgacagagggtggagggtcccctgagctggcccgagctgctcgtgtccctctgtccggcttctctgaggcctttctttgtgccttccttgaagcagtaggccggcccaggccctgttgtgaaagacattcctagtgaaaccgaatgtcacatcacgctgccaagtctgagattcacattcctcccctcactcctcagcctctgtccgcccgggctcttgggaagagaagtggttcagggataggtgatcctgacgatgatctcctggtgttaatatttctaatgccaaggttttgaaaaacatgttaagtttctaaatatcttccgtaaagttaagcctgcactcaagggaagtcactacaatgacttagccaagaggagctcaggagtttttttaaacgtatagtgttgatgtctgggagaggatcacgggtggataggagagctgagagcctgcttcctccctcccagccatcactgccagtccttgagaggcttggtcccctccccggtgtctggagggctcctcctggaggttcccagacctcttggctctggtgatgggaatgcctggccctccttgactttggtcacagagcaggaagccttagggagcatgcggttgtgcaccttcacttttgcaggtgaaaagtaactgaggaccagaaagatgacatgcagctggctcagggctgagttccggagcctggggtttgtcctggggcctccttatctccaatgggaagaaaaccgtcttggttttgcggcggggacctcaggcacgggtgcttggagaaagctgttgaccctccttctttgggttttccgcacctaatgaggggagaggtgacatttgtcaggtgcggctcaggcatgaagctaagcaggacagctcagagcgtccagatcatgtacctgagagcatgtcctcggctgtaacaggagtgcatctgtgaggcccgatacacgaaccacacgtggctattcattcaaattacatggagttcgaagtccagttccttggtcgcagtagtcacatttcagagccacacaggtggtactggatggcactgtcagggcagaaccttccagtgactgagccactctgagctgcccccatgccagcctcccctggaatctgttagcaatgctgattctcaggcccagcccagacctgacagatcagactctctggcgggggtggggggacagccgccccgtctccacagctctcccaggattcggatgcagctggagtttggggaccactctgtgagtcatctggagagcacgctgataactcagtttcatttctgtggccagatcaagtagtttcatttctctccctgtttgttgatgacggagcaggggagggagtggttcatatgccacataaaagtgaagtggaggaaagggaagagatgatttctccatcctgaacgtgcagcggtaagagcggggccggtgcagggagggctgctttgtgtctgatgcacagcagatgcgtgtttaaaaaatatttcctgagtaacgtgacatctgcttggtgaatgtggcttgtgctgggaggcaggagccacaaagataagattctggtgtgaggagcagaaagggcccatgttgccaccagcccacagtagccttgtgcacagacaaagaggctctggaggggaagtggctggccctggggacagggtggcctccatcctgatctggccaaaagtcgggtggacgcaaaggggtggtttttaggacagctttgctcagcgtcctacaaagtctgggggttgagtaaggagctttgtgcccgaaaagtcgtctcggagggtttcaagtgttccttcttttgtggtatttgtgatgctctgacgtaaccttagtgacggtgatatgctgggaaattggctctcatggggcggggcagggcagagggtggtgcctgatttctagcctttgccgattctcttccgttctcatggtgtgaatgctcccaccgtggccagttcccagccagtaggggccaactccagcactctggaccactgcaccctggatcgcctgcactctgggggctgaagtccattttataattgatatagagcggaaaggagacatggtggtattgatgacgcagtttttttttcttttttttttttttttttttttttttgagagaagttctcgttctgttccccaggctggagtgcagtggcgtgatcatggctcactgcagtctcaagctcccgggctcaagggatcctcccacctcagcctcccaagtagctgggactacaggtgtgcaccaccacacctggttaattttatttctttttgtagagacaggggctctctatgttgcccaggctggtctcaaactcactggctcaagaagtccttacgcctcaacctcccaaagcactgggattacaggcgtaagccaccccattcggctttgatgacaccttttgaacactgttctttctcattttgtgtttagaatgttgtctctagctgtttaaaaagatcaggattccaagctatctttcctcgcaccctctcctccgtttactctgctctacttcccagccccgcgccaacccctgaagcacttttgactcccttcggatgtacaatttttttttctttttcttttttgagacagggtcttcctgctctgtttcccaggctggagtgcaatggtaccatcatagctcactgcagccttaaacttccgggctcaagtgatcctcctgcctcggcctcccaatgcattgggattacaggtgtgagtccctgcgtctggccaggatgtatgtgagctttatttaggtttagcccctgccctagaatgcaagctcccccagagatctttgtctgcctgactcgatatgtatctcaaggacttagtgctcaatatatatctttgagtgggtgaaaaacaagcggtcttaaaaagaaaggaggtgagcccggggagataaggtcgcattcagtgccagtgcttggtcagccatgaccctgcaccatgcgagtgacattgggactggagcaaagggacacagcagagtggcccctggtgcccaggacccggcagagctctcggactggttgcaagccagcaatagtggctatgcccgtgtgggagacgcagcttgccttagacttcagcgggaaccaccatgtccggcacagccatttccatccttcccaggggtgcttacgtgatcctggcagtctcagtcaaacttccaaactcagcagggaatgtgtgtgcttgtcctccaatctcaacaccctgggatgcagtgtcaggtgcaggtcagagacagcagtggagacccgattcccagccctgggctggggcccccacaaggcctccagcatctccccatggcccagtttcctcatctgcaggacaggctctcttgagaatttggggggatgatagacccaaaagcattctggagccagaggcttctgccttcgtcgggggcatcagggagtgtcagtcatgaattcaccatgacttctgaccacctctgcctggactccctcacctcagtgctgcctaagctgggtaaccaccagcttcctgggccttcaccccgcagggccttcctctccagtgatgcgcctggaaagagggatttctctttgcaaaggtctctggaattgccaagttatggctttaagcatatgtagggaaactccctcccctttgcacttttggagtttttttccagccctcaatagaaatcaatacagtgaccaggctgcccttttcaccacactctcaggctcctgaggaccctggtggaagatggactaagcacatcctgggcatcggggacaggcaccggctcctcaagcgtggacagggacagggatggggcggggcagcgctgcaggaggtggggcctgggctgattttcttgctgtactactttcagtcactacgtacctgttatgggttgaactaggctccctgtattagtcagagttctctagagggacagaactaatggaatataaaaaaataaatatatacatatatatggaagtttactaagtatgaatttacaggatcacaaggtccacaataagcaatctgcagcctgaggagcaaggggagccagtgtgagtcccaaaacctgaagaacttggagtccaatgttcgagggcaggaagcatccagcacaggagaaagctgtaggctgggaggctaaaccagtctctcttttcacatttttcagcctgctttatattctagctttgctgacagctgattagatggtgcccacctagactgaaggtggatctgcctttccaagccactgactcaaatgttaatctcctttggcaacacctcacagacacacccaggatcagtactttgcatccttcaacccaatcaagttgacactcagtattaaccatcacacccctcaaatgtatatgttcaaatcctaacctcagaacctctgaatgtgaccttagttggaaatagggtctttgcagatgtaattaaagacgaggttgttttccagtagggtgggccctaatccaatatgactggtatccttataaaacaggaaaatttgtttgtttgtttgtttgtttgtttgtttaacttctattttaggttcaggggtccatgtgcaggtttgttacatgggtagattgtgtcatgggagtttagtgcacacattatttcatcactcgggtaataagcgtagtagccaatggatagctttttgctcctctccttcctcccaccctctacccttgagtaggctcaggtgtctcttgttctcttctttgtggccatgtgtgtttaatgtttagctcccactaataattgagaacatgtggtatttggttttctgttactagattagtttgcttaggattatggcctccagttccatccatgttcctgcaaaggacatgatctcattctttttgatggttgcatagtattccatagtgtatatgtaccacgcttttttatccagtctaccattgatggccatttaggttgattctatgtctttgctattgtaacggtgctgccatgaacattcgtctgcatgtgtctttgcggtagaatgatttctattcctttgggtacatacgctgtaatgggattgctgggtcgaatggtaatcctgtttaagttctttgaggagtcaccagactgctttccacatggctgaactaattcgcactcccaccagcagtgcagaagtgttccccaaaaggggacatttggacacagacacgcagaagcccactcctgcctcctcactcagcctggatttgtctcagtcgccctcgcttgcctctcacacgtgtgcaccctcacactgcttcagcatctgccggtcctccggcctttgctcttagagcagagattctcaacctttctccatttgggcttccctgagtggttccgtagttcatttatggtgcccgccacccaaaataaattcctggcagttctatttactaattaggtaggtccaaacaactcagtaatagtaggctgggtggtgtccaacagctgccttcgtgtatcactgggaaatcttaaagatcccacagtggcctgtgagtttgctgaaataccccaggtgcacagtttggggaacatagtcttatagatttgatgaattccctttttgcacctgtatatcactcacggggctgatctatgactggtgtgctagtccatttgtgtcacgatagaggtaaacctgagactgagtaacttacaaagaaaagaggtttagccgggcacagtggctcacgcctgtaatcccaacactttgggaggccaagtcgggtggatcacctgaggtcaggagttggagaccagcctgaccaacatggagaaacctcatctctactaaaaatacaagattagctgggcgtggtggtgcatgcttgtaatcccagctactagggcaggcagaggtccttctcagatgctttgggtcctgccattgaaagggaagaagagaagtcccttccctgggagagcctcagtgatccctgcacaagaccagccgtcttcctccgccccatattgttcagccctggcaccctgtgttgtgcgtggagtcccttgttttcctctatcttatcaggaaccagttctaggttcctaacctggtctgaccccggcaccctgtcctgttacacaagaaacccggatgctgatatatatatgtcccaacattgcccttccagagcctctccagctgtgactcactgttgacatggcaacccccaccccctggactcctcgctcaacccacaaagactatctcttgcgtactctgctctgaggtgttttaaaaagcgccaccataaacctgtaacacaagaatgaaacccagcaagaatcaggggacaggaaccaaggaacatgacatcacgtgagaactaagggccgctctgattgaccatagcatttggctctcagcctcccacggccaaggctaagggaggataggacaattgtctctctcactcttgaacaagagggagctcctggattcaccgggagagtaaatttgactagcttggacttctgcaaggtaatttgttgtgactgcatattaaggagactaatcttaacataatcttaacataatttctttatattaaggagattaaataaatccatggatatgttcttgagtgaaatttttttttttttaaagcagagaccttttccacgggatcacattttcttttgacactcctgggaggcaggcaggaccatgttaagtggctgtttttcagtgaatgattctacggggaaacctgaataagatggtaatgttataggaaagtgtctgatgcagaacccggcaatggctaaaactggaagatgcaaagcagcctgctagtgtgggagctgcaataaaccaaatcccttttttttctcagtcagaaggagggactttccaagcttgatcctctaagaaaaaaggatcccctcctattttcttaccgattttcaattcatccagaatgcatgcttcttagtcttcagactcctggcctggtcaccgcttgaaaatatttggcagccccctggtttaacagcagcctcgaagttgacagcaactccaaatcctgcggctcagcagtacagagccagctggcctcacctctcctctgggtccactgcatcttatcaaggccttgctgtccttccttggatccgtcacccccgacctggccctcagtagctccctcctggattctgacctcaccctgttcctcatctttgtcttaactcttaacttggctgtctgctgcaccctgacagccaccttgtcttctcttttctcctcttctctcaccagctgtcttcttggtttttcagttcccctctctcaagacctgcactttctcttcaagtcaaggtccacagctcccatgctctgcatttatactgggctgcggaagctcccacgtggggaccaagccctggagaggaacccacagtgcagcggctcctgaaagcagaggcctgcacccctaagcctcttaagccccccactttcattccctcctgcctctgtgcatagcccaagtcccacctgtccatgtgtcacccggctcttccgtgtcgtctccgtgagcctgcaggggcacccagccagccgacaggctcccgagacagtccactcacacagacacactgtagccatttctgaagattgtgcaggggagacagatggttcaccaggcacacaccagacaacccgaaacctacattccttactcaacaggcccgtgtcagaaaatcctccctaaactgcaatggggagggggactgagggaattctcatcccctacatgtcaccccacggctcactcctgcctccgaccttcacacatgttcacccctgcaacttttcacccctttattttgcagagcaatctgtgcccagctcctgtcctctcaaacttaatcagctcatgatacgcttagcaagacctgcccttcatgaaaatgagggtgagggtgagggtggcgacagttttaaatatgttttaaaaggaacatgaaatgaagaatattgggcttcacaaaaggaaccctcctttcccttgttctttcttcccatggagaggaagaagttgaggctgagttatcacctcccatcagcactcggttttgttcctggacccctgacttcgtcaccaagggcagctggctccagctctcagcctttgaaggatattgtggctaggggttcagagtcccaggctccctcccagacagatgggtggagtgaggccacctgagatctcacttgctagggtgggtgccaccaggcccaccgagctgctgggtcctggccaagccctcctgtaccccctgagaaagtctccgtagggctaggagctgtttgtgccaactttagatggactcatctctcagtgatcccataaaattgctgcctagcccttctggtttcaaggatttcacatcagaaaacgttttacgaacccagggctagttctgaaaacaggaagtgctttcagcccccatgggaggaggggggtgcaggaggcctgtggacctggacctctgggagccaggctggagaacaggagctgaaggctgagcggcggcggggccattcacacaaccatggtctttcctcccagtgaggagggaccccaggtggggctgctgagctcaggagccgctggctctgctggaagatccgcccctctgaggctgcgcggggaggatgcaagactgggcaagagctcattaggaaacgctgagacagagggtcctagtgaagattccactgcagagagggcagtccaggtcatcacagggtgacatctggggatgaggctggccggggcacggggcaggtttttgagcccggcagtgtaagcagtctctgtcccaagggaggaaagccgctgagagctgctgggccagcaggtgggagtgctgggctggcctcagggtttctggaaggggtattcccgagaagtgaggtgctgctctgggactctggtgcccctggggccttcctgcagggcgctctcagcagccaccttcggtagaagccagggccaccctgcatgggggatgatgccgcatccagcacagagccttgcgatcagtcactctcctccctccacaatagcggggacctccctgcccgccgcacccctgccccccgcccccgcccccgctcccgccccgccgtggctgtgcagcaagcaggggacagtcccatcagcaaagtcggggaacttccaggaagcccgcgtccccctcagcctgcctttagccagaaaagattccaagctctgctctctactttggaaagccagtgtttgcatgtggagattgttttgctagactcgacgagggtagcaaagcaacaggaagtgttccccagagctccgcccacgacttgcgtggcccaaagctggatggtcgtccgtcccaccatggcgggtgggtaaaggttcttttcctgggctgtgtcattccacccagagcaagggataagcctgtgatagccgtaaatccggaaccactaccaaggtgaaagaccttcaagttaattgttggaacctgcggctctaacacttccagcaaagctacttctgtgaaagctgtgacgagcagaggaaatgggacaggagaggagctgaatcctgagattgtatcgctaggagcccccaaagtacgatgacggtcctcgggccagcatgggggtgcattggcaccatgtaaggaaaggggccctcccgtggcaccgttggagtggggcggtgtggggttgttcggagagaaaagtttcccatgagctctgtttcagcaaacggcgatgaccacttccgtggcaactaaacagtcttgccttcctgcacgtggacatttttcttcatgcatatttctcttgcaaatggttctattgtttgtataacagtatttcatgagcggagaagagttggaagcaaaaatctgttcatgagaaatgtaagtatgtggtaacattgccttcagtgaaattgagagcagatctaaagggatgtgaaaagcatcagggtgctcatataggaggcaggatcatttcccccagaccgcggccatgcgggttgtgttttatggtaggagtgattatggcagcctatgtgtgtctgggcataagaatacttattctatggatcttaaggtaattatgtgttggaattatgtgttggaaaatgtatggcgtggaattcagtaggggaatgctcacgatttgtgtggttcctggagttggaaatgggtggcagatccagcaagaggcaagatttccaaatggactgctgagtcattcttagggtgggctaggagaaaatgtgttttggtctgaaggagggaggaagaagacaaaaacaagtaaattagaaaacgtggttgcaggattgaaatctgatcctgaaaaagagagaatagccatgagtataatgtttaaaaatacacacaaagaaatccactgtggtgggagtcacaagaagttcaatcattatctggtctcgtcatctcgagtgaagctgtccactcccaaagccgactgcttggtccatagctcttagtttttgcatctggaggcttttgtggttagtgttggtttgaggtcatttgagctgatccattggtctgggtttgttgcctgtttctactgactcttgagtacttgggtcaacaccttggatcttgactgccctggcatttgctaggaggacctgaaatggctccttccaaagaggtctgaaaagtttttgccttgaggtctcttccagcggacccacaccaggctggaggtcagaaaagtctggccggcatttcctctggctggcatttcctttgggcacgagacttggtgtgtgaggctaatccttgacaatgcttaactgcgtacatgaaatggagcagagccaggccttgctggagttactcctggtcatgtacagcatctggttatgatctcatggggtgctggactaagtgagcactcagagacggtcacgccaatagcctattatatcctcgacctaggagttaaggagtaatcttctgcttactccttaagcagctccttaaggagctgaggcagataaattgggtgtggcaagcggggtgtctgccaggcccaggagccccggctgtcaccagtgcatgatgtgactttgggtgagccacatcttctgcttacagatagaggccaagaccgcacggccaataaagctggtggcaaaactcaaagcccagagagatggagggttttttatagttagggaatttcagcttcagtgtgtgattgattttgtattttgcgaacaccgagggtgattcagacagtgaagtgtctgtgttagaagaaggaccctccaggacagtaagtctataatcttttgataggaagataggtattgtccatgctgagaatagaaagtctagcaagaggtagacttgctatcatgaacccatggctctgaatcctgtctcacctttacagtcttgcctgggttatattggttgcagatgagataggactctaccacttcctgggccaattccagaaaatttcctgaccaatatgcattgcatgtaaaacttaatttaccttttccatgatgcaaacaattatggagtaatttagctaggaaggctcatggcactcaaggacaggtgttctgagatgaccagattccatctttattaagaaactatttttgagattgccaatattacttgtcagaagtttgcatcgattattatgagtcaattataaatggatccaattttctttctgaaagtttggtggatagatgtcagttactattttagaactcttaatatagtatttaaagctatttttttttaacatgaagtcagtaaggacatcgcccttgacttctggcatggcttctcaactaaaagcttctactttagtatctcatacctcctttggatattgggtagcttctaataagttactgatcccttactcatttttgatgtgaacaatcacagatatcataaatcctctgtgcttccgtagcatccccaaatcataagcagctccaaatgcccatcttatctattcttggtataaatgcttactgttttatctcttaaaataatgtgacttgaagtcaggactacagcttagccactgggaaatagctcacatgaagagatagaacattttgatgggtgcatggcagtttcctacgcaggaaatgctttcgccatttttattgttttttcctccacagcctttattaagctcctactgtatgccaggtactttgggctgcaggtacagctgtgaaaaaaaacaggtaaaaatccctgcccccctggggccttattgcagctggggagacaggaaacaggcagaatccatcaggaaagatatcgtgcagatggtgggaatgcagcttttgactgttgcctcccccatcagatccttagcaccaaaaaaggtggcagtgtctcccggctgggtgtccagagcctggcacacagcaggcactcaatgaatgtttacagagtggatgaagactcacattgactcaggaactgcagctcagagagagcaaggaacccaaccaggggagccatggagctgaggcagataaattgggtgtggcaaggggggtgtctgccaggcccaggagccccggctgtcaccaatgcatgatgtgactttgggtgagccacaccctctctgtgccttgttgggagtaggcactggagagcaggggtgggagcggtcattaggatgaggtgtcctggaagcccacccctgccagggccctccaggctgcaggcagtctccagcccgaggccctttggagttgtgtggctccccctccagctgctctgtccacagatcttcctgctctccccaactcccctctgcccttcagccccacagccagccattagctgacttgttgaccatgacttcaaagcatccagaatccagtcggctctcaccaccctctttgccattgtttccaaaagggtgttgcccctgggtttgtcttttggagccccccaggagaagggaggacttcaaagacagaaagagagctaggcaccaaacctcaagcaggccttgctttcccagactctcaaacttaaaaaaaaaaaaaaaaaaaaagccagacagagacaggcaggtgtcctcccagccgggcctcgatggctgtactgcacccccctcctaaacagcaggcgggaaccagccctgggacaggctccacacactcactgagcaccgcctcctgcacagcgcagtccctgctctcagcctgagcaggcgcagcagccctgccctcccaagaaaggggatggtgagaagcctagtgtcccctccacagagaccagcgccacacatgacagccacacatgacagtgttggtaccagcactcagtctttgagccacaagtgcttataagatgtaagtaatagtacggaaccctcccacatcctcaggaggaacggtcagccccattttctagatgtgaaaactgacacccagagagatttcagcacatgctctgggtccccgggtcccatgcacagcccttgtgctggacggccccaaccctactttctaattctttatcctaaacccggactgtgggcctcatcttagggagatggtgctgccacctgcctctggaggacactctgccttggcctagtcctgccctgcccctcgccgagtggagcctccacagaggcttgtgcatggctttgggatcccgggcggcaggagtagggtctgggctggtgagcagggacggggaaggccccgacagcagaccccatgaggatgactgggctccatcctacgtggaccttctaacgagccacatggaagcatgtccatctgagaggtgggagaaggaggaagttgtccccagttgtcccacctcaggatgggaggttgccccaggggctagcttcccacttctccaggctgccatgctgaaagccggcaggtgtcgcaggtagcagatgtggcaggttgctcgagggagaaactctggacgcatgagattcagttgtacagagcctgagtcctgtggcctggcccaactgtcccaaagccccagcactctggctgtgtgtaaaccttacctcttcttcatgcccttcctggtccatggctgtgtcctttattgtacctggtctccttatcttcaagggtgcccatcacaccactctccagctcagaaccctccaaaggcctccctcacacccacacacaatgcaagacctctgcccacatcttgcaagcctttttcctccctctttttcaccagtcacactgaccatcttcctattccctgagctcattccgacctcaggacctttgcacatgcatttcctctgcgggagaggctggtccccacttcctccaagccttgctcctctgcccattcccaggcacaccctccagtgggcacccaagttaccctcaccccagaatctcaagcccaccacctgtctttctccagacactcccttgtcacctggagcctggttggttggtatatttgttttggcatttccctgctaggatggtgtgccaggagtgagggcttggtctgacttgatcaccacaataaccacgtggtggaaagtgcctggcacattcagagtcgtacccttgtatgagtctgctcaggctgccatggcaaaagaccacagactgggtggcttagacaacacacattggttctctcacagccctggaggctggaagtcccagatcaaggtgtcggcagagctggttccttctggaggccccagggggaatctgtgctctcctcccagctcctggtggctgtggcagaggccttggcattccctggcctgggctgcagcactgcagtctctgcctctgtcttcacaggcccttctccctgtgtgtctccaggtcccaaatctccctctgcctgtctctgataaggacacctgtgatgagatttagggcccattctaaatccaggatgatctcatctcaaaatcttcaccttaattatatctgcaaagagtctttttccaaaaaaaaagtcatgttcccaggttccaggtgaacataaattttggggggactgtggggacaccattcagcctcctagatccacattactactagaggaaagggggatacagtgtgatccagagtgtggggggctcctgcccggagcacaggcccagctctgagtcctggcttaggcgtcattggccctcccggatgtcagtttcttgaccctgaaaatccagataagggccaaatgcataggcttgttgtgaagcttaaatgtatgtctcagcatggtgctgccctcatctgagtgcaggccacagcctgagaactggggcccaacacctgcttctcccacactcccctggtgcctggccaagcccgggtgtgaggccaggtctggcttccagcaggcccaggaggtgctgcctgtcatctctgcacacctaatggttctcctgcctggtgctgagccacagagacctgatgccatagatgacacagaccatcagaagtgacaaaggagactgggtgtggtggctcacgactgtattcccagcactttgggatgctgaggcggacggattgcttgagctcaggagtttgagaccagcctgagcaacatggcaaaaaacccatctctataaaaaatacacacacacaaaaaaaactagctgggcatggtggtgcatgcctctagtcccaactactcggtaagctgaggcagggggactgcttgagtccagggaggttgaggctgcagtgagtcctgattgcaccactacactcccccactgggtgacagagtgagaccctgtctcaacaacaacaacaacaactacaagtagcaaaggaacattgagactctactgggaatgtggagtccactgccccccgttccccaagcccgggccggtagaaatccacttgtgctctgtggctgccaagagcccctcctgcagacaggggccctgcactggacccctggtctctgcatctgtgtgtagggggtaggttgtagggtggggtgaggaggggttggcaaaagtgccaactcagggaggacttctggtgacctgtgggccgctctccctcttgtgtctttgcagagcttgtcaggaagatcggaggtgccaagtagcagagaaagcatcccccagctctgacagggagacagcacatgtctaaggcccacaagccttggccctaccggaggagaagtcaattttcttctcgaaaatacctgaaaaaagaaatgaattccttccagcaacagccaccgccattcggcacagtgccaccacaaatgatgtttcctccaaactggcagggggcagagaaggacgctgctttcctcgccaaggacttcaactttctcactttgaacaatcagccaccaccaggaaacaggagccaaccaagggcaatggtaagcccggtggagggacgttcagaaagggtgcattctggctgccggtgcagagggctgtcatgtaagcccaccacaataatagaaccagccagtctgctcctccagcacagctgatgtctccagctctcctggtcatgcccaacaagtaccaggaacatacatagactctcctgcagcaacgggctgctgcgacgtgggtctggggcttctgtgtgcgggggtccccttcctggagcttttctttcagcctcccctgcagccatcacattgccagcccacccacttgccaccctccccagctctgcagctccccaacccagaacctctcctccctctggctggagtctctgcctcttggaacttcttcctggctcagtgctcccagcccctccccaggaggcacaccctgcacacctgcagccaaatcctcccagcatctgcccctgtgaggcctcaataggaacagaacagaagggcccctgaaagcagcagcacccctccatccaccttctcacctcctgtctgcaacccaacctaacatcatagccgcacaaactctgccacacatctccatgacaccagggaccctatcaggggtcaaggcagtggcatctgttctgccttctccaggggcccgagaacaacctgtacagccagtacgagcagaaggtgcgcccctgcattgacctcatcgactccctgcgggctctgggtgtggagcaggacctggccctgccagccatcgccgtcatcggggaccagagctcgggcaagagctctgtgctggaggcactgtcaggagtcgcgcttcccagaggcagcggtaagttcaacggaccaccttccctccgcagcaagcagcgccacctgtaagccacaaagcttccccaggcaccaagaggttttagagacaggctgctgggtgagagagctgggaaagacaggacgctgggagagaggccgctgagagagacaggccactgggagagacaggccgctgggagacaggcctctgggagacaggctgctgggagagacacgttgctgggagagacaggtcactgggagagacagaccattgggagagacaggctgctgggagggacaggccattgggagacaggctgctgggagagacagatcactgggagagacaggccgctgggagagacaggccactgggagggccctaggagggcagcttctcaggcctggtggcagggggctggattccccatacatgtttaaatagctttcactgcccgtgtgtcagtcaggtgcagggaccttgccacctcttcctagtggtctttgtaagaatgtagaagcatttctttgataagttgataagttttaggtgacaggcgaagccttcttaaagaattgtctcaatgttttgaaaacctcttatttaggatcatgatatgagacaccttttccttgaacaaaaacttttaaaagtctgtttagagtgaagaagctgttgtacattcataatttaataaaataattataaaggaaaatgataaaggcggtaccctcagagtgggtactggagagtgtttagaaaggagtttttaggtaagcagggcatagggaagccagcaagaagggggtgggacaggaaggggagcagcttccagaacccaagaaggagcagcatgcaggggccctggcaggtgcagcggcagcagagagcgcccagctccttctcctccctggctcccctctcctgccactgctgcttacttctcaacccaaccagaatgctggggtggccgggaggcatctgatggtttctccaaggttgcccagagcaaggtggggctgctggagggctgcccggaccctgcacagccccctgcaacaaccgcaaagccacagtgagcctgggagagtgcccctcccctggcctccctgctgccacctgcagcctggtcctttacccagcgtgtcccgtaagatggccatcagcctgggcacaaggcaggagagagtaagggtgtgggatggccagtccttctccgtgctctgggttcagcatttggggcagtgagactacggggtggagagtctgaatgccagagggcaggcacgggaccctgggcgagtcccatagttggaagacgggacaatacctccctatagggcacgggacaaaggtcgcgggttctcagggcttcacggcaggagcgtgagggcccccaccccaaggaactcagcaccgctcccacctttcctgggttcagtagcatcggaggatcctgcctcaaagggcactatcaggattccccttgctcctccttcgggatgtccggcttctcctccaggctttcaccaccttcttcccactccttgagaggggttccatggcccctggatgggtctcactgctccacattcccgccatcccccaccccccacactaaccagggctgcccaccgggacaattacagggcctggggcagacacctgacatgctgactccagctgcagaaagacggggagcctggacatgtaccggagccccagcatctgcctccatcacttccagggcagtgtggtgggggctatggctgtggtgaggactgtggctatagccacttgctcatgtccatcggagctcagggtgcttactccggcagcgaacacttcccaaggatagcagcacctcccagggccctgtgcccctttgcatctgctcagtccagaccccctcacctactaccaggccccagggagagccagaaagtgcagacgaggcctttggggacagcagggcaggttctgggagcgaagggcccagtgccacttctttaaaaggaaactgaggatatttggggaacctctcgctcaggaatcgtaaccaggtgtccgctggtgctgaaactgaaaaagcagccctgtgaggcatgggccggaaggatcagctaccggaacaccgagctagagcttcaggaccctggccaggtggagaaagagatacacaaaggtgggcccacgtcattctgaggttcggatctggcagccgctcctctcacttcctcggttccttctcctcttcctcaagtcacccccacagtgaccactcagctcctagccccatgtgctcccacatggggctgaacccattgctgtcacctccaccatccctccaggtccttgtccaggtcccctctcatcgagtcatcccatgccgaggaccctctggtggcttcccttagcagcctgcagcccacgtggctggccttacctgtcctctcccgctccccgccagcccaggctttctctactccacagggtactcgccctctcttccttccaggtttctccccttcacctgcccaatccctactcgatctttggatctcaggtcacctgcgccccctttggaaatgctgctgcaggacccctggtcccaccccaggtgtcacaaccatggcttgtcttcctgaagttcagctctaaccctggccagccaccttgtggccacctttcctcccagcaccccctccaaatgcagacccctctcacccagctgtggaacaagtttcccaatgcttgttcttggccatggctgatcagaaaaggctcagttgctcctggagtccacacccttctcccccgaggggccctagtggttacgtcccttggagtgcacagccctgcctgccccaggcactggagcctctcaacctccctaaaggcttctcccctatcctgcctgcacagcctgtcctggactcagccaggatagatggaaaaacaatcctgaatgtactaagactccctgcagggaggaactaagtccaaggaaggccttttgcattactggatagcaaactcagtgtctgagcgggggccctttagacgaccctgtgggctcagccctttcccacagaacccctgtctgcctggatcaaatggctttctggaggaatcccttcccaaatagagaggtcttcactccaatttccgtgttcacccctctaaaacagaagctgctggataccctcaattagcaagtttcctaacttcaaattgcaaaaggtctgcaccccagctgtgcccaccacagctactgtggtgctcccaggacatcttgcaatgttcgttgacatctgtctggagtctcaccagctgtgagctctgtggggcagggccaggagagctgtctctagcagaccaacagcacaccatatgtgcaggcttggtcaaagttttgggtaagaatgaatagtgagggccaggcgcggtggctcaagcctgtaatcccagcactttgggaggccgaggcaggcggatcacgaggttaggagatcaagaccatcctggctaacatggtgaaaccccgtctcttctaaaaatacaaaaaattagccgggcgcagtggcaggcacctgtagtcccagctacttaggaggctgaggcaggagaatggcatgaacccgaaaggcagagctttcagtgagccgagatcgtgccactgcactccagcctgggcgacagagcgagactctgtctcaaaaaaaaaaaaaaaaaaaaaaagaatgaatagcgagcaaacccaagacaagacatctttagaatagcatcttggaaccccctccactgctggtgggaatgtaagttggtgcaaccactttggaaaaccatctggcaatcttcactaaagcagttggcaggaggccatacttccttaccttgtggacttctccatagctacttagtgtccctgtgacatggcagccagcttcccctagggctagtcatccaaaaggaatcaaggaggaagccatgatgcatttaggaactagtcacacaccatcacctccactgcatgtattcattagaaacaagcccctatgtccagccaatagactgggtgcttttggagggaggaatgttgaaggatttgtggacatattttaaaaccaccacagcactcactggaaaatgctaaaaagcaggaagaaagagaacagaacccatccgcagtcccatagctaacataccagaatcttttcttctcgtcttttggaaagtgtaggtctgtgcacctacatattaaacagccatcttggtggcttctgagatccctctgcaggcttctctgaaatgttttctaaacaccagggacctactgaagctctcataccctggaaaggagcagtcattaccttcaggaactgcttcctcacagggatcattaatgagggctctgggtttctcccctcctggcctccatagcccagaacgtcatggccgggaatggccggggcatcagccatgagctcatcagcctggagatcacctcccctgaggttccagacctgaccatcattgaccttcccggcatcaccagggtggctgtggacaaccagccccgagacatcggactgcaggtgagcccttctggaatttgggattgggctctgctgaagtgggggaagggtcagaggtccccagggtcctggtgtacctcctggagcctttacactgagggatgaggatggagtctcaggtaagacctgcccaggtgggggcctcatgcccaggttctgacttgggcttgacaagtcacagaaaaaagagagttggactccaggggactggcaggcatttgggatagtgtacgccctgcccagtcattcaggactgtgaacccggtgtgatcagttgtgatcagttgtgctgatagtcaaaagcgggcagaaatttggatttttacatgaaatctgtccattttggcaatattttaaaaaatgaatgttacataagtcataacatggactgtggtcctggtctgggcaggagaggcacaggggtgagggagggcgaccgggcaataaggacacacatcagccaacagcagggctgtggcttctctgccaacaacctacccatctaaacatgaggccaggcacggtggcgcatgcctgtaatcccaacactttgggaggccaaggcaggaggatcacttgaggccagaagttctagaccagcacgggcaacatagtgagaccctgtctctgcaaaatataaacaaaattagccgggtgcagtggtacatgcctggggttccagctacttgggaggctgaggtgctaggaccacccaagcccaggaggtcaaggctgcagtgagccatggttgtgccactgcactccagcctgagtgacagagagagactctgtctcaaaaataaataaataaataaacctgaggttgcctgaaaacatagtcctcgctcaggtgcctgaatcaaatgtggtccaggaaaacttgtgcataccctgtttgggttaggccagtccccggaccagccctgtcatgctttggcaagccagctcatgtggaaatgaaggagacagagtcgatgccagggcaggggaaggctggggagatgaggccctcctttgctagaactgaggccactttcctggcttcttccattttgtgggagacagtggcagtgttgacaacccaaccacaaccaaattaaggggtggcagccctaagagcctcctgggtggggtcttcactagctctgctgtttggggcaaaatcttggttagtgatcttcctcaacatccaaatcgccattctctgtctctctaagagcagggaaattagctcgtatcacttgctgagttaagtgatgaattccatatttcttagccctcctaggagggtggctgattcatccatcaagttatgggatttcctagagactgcaaaagatccttgggtggtgatatggtttggttctgtgtccccacccaaatctcatctcaaattgtaatccccacgtgtcaagggagggaccaggtgggaggtgataggatcatgggggtgttttctcccatgccgttctcgtgattgagggagttctcatgagagctggtggctttaaagtgtggcactttcttgttctcgcacacattccctcctgccgccttgtgaagaaggtgcctgcacccccttggccctcccccatgattgtaagtttcctgaggtctcctagccatgcttcctgttaagcccgtggaactgcgagtcagttaaacctctttcctttataattacccagtctcaggtagtgttctttatagctgtgtgagaacggactaatacaggtgggatcagaacatgcagcttcctcctgccacttcatcctctcctctatggaggatacacatgatttggtctgagacagtttgatctcaaacagtttcatcaaaagcaagttggttgagacggcaaaatttttccgttgttgtaaatattgggggaaataagtgtgcggtctctctaagcttttcatttatgtttcagatttctaaagggctttgtttctctacattcttttacttctaattatcagctcataattacagccacgtgccctatgggactggttaatccctaacagtgagttatgatgcacgttgtacagtgtgctcagttaccaagccttgacctggtgaccaaaaagaattctatctgaaagggtggcagtatacgaaaacactgccaagtgaacaagtgttttataaaaattaattaggttccagctacttgggaggctgaggcttgaacctgggaggcagaggttgcagtgagccaagatcgtgccactggactccagcctgggccacagagtgagattctgtctcaaaaaaaaaaaaaaagaattaaaaaactaattaggaataaaatgccctaccttaagtttcttttgtttctttaattcttgcttaaatcattacaaagggattttgttattgaaattgtcaagatagaacaggaagaataaatgttattttatgccccatccctgttaacatggagtatataaacctgcaagtggccttctgtgagtgtgagtgtgagtgtgtgtctccttacctgtctcactgtcttatcatccatgtgtttactggagtagcacttctaatttctttcaagaatttttcctttgtattcaacacttagctaacgggttggcacaagcagcttagcttttggcctttacatgcctttctcactaaactcaatcatttctagcttttaatttaaagtaagaaacatgcaacttttccttttagttgaaggaaggccactgatggtttggctgtgtccccacccaaatctcatcttgaattgtagctcccataatccccacgtgtcgtgggagggacctggtgggaggtaattgaatcatgtgggcaggtctttcccgtgctgttctcttactagtgaatatgtctcatgagatctaatggttttatgaagggcagttcccctgcacacgctctcttgactgctgctatgtaagatgtgcctttgctcctcccttccatcatgcttctgaggcctccccagccatgtggaactgtgagtccattagacctctttttctgtacaaatttcgctgtctctggtatgtctttatgagcagtgtgagaacagactaatgcagccactctatttagaggccactatagagctattaattggcctaattttaatattgtggtgcctcagggaatagagagagggagagaggctggggagccgtcataacacaggcaacatttattaagttatctatcttatatgggcctgctccatagcaccccaaaacaattataataaaaacatccaaaattgataatcacacatcaccataacagatagaataataatgaaaaagttggaaatagcacaaaaattaccagacacagaggcagaaagtgaatatatgctgttgcgaaaagtggcaccaataggcttggtcaactcagagctgccacaaacctttgatttgttaaaaaaaatacaaataaagataagggctgggcacagtggctcacacctgtaatcccagcactttgagaggccgaggcgggtagatcacctgaggtcaggagtttgtgcctgtaatcccaggaggctgaggcaggagaatcactcgaacccgggaggcggagcttgcagtgagctgagatcacgccactgcactacagcctgggcaacagagtaatactccatctcaaaaaaaaaaaaaaaaaaaaaaaaaaaaaacaaatctgcaaagcacaataaagcgaagcacaataaaaggaggtttgcccgtgcacactctctccacatctgagccttctcaggtataagtgctgccttcaagagagaaaaaaatttatgttttcttagagcaaactgcatgagagaacagggtcacaggagtttagaggagcaatgaaaactgtcattgtggctgtgagaggctgggagtgtgaaagagtagggagtaagaactgttatggcagagggaaaattcggatcaagaccagtctgggaatccatcccgaaacatctccttctccatcaccttcccaccctccttggccccctgtagtctgtcctagacctctctcctgcagatcggggcctccaggtcccacaggctccctggagccccagggtcctgccctacccaacctggctgaggcctccaggtggcctgtctgagcaccaggaagccattgctgggaattcctcgattctttgacattgtcctccacgttcctgggcttgtgaaggaacatcctcctccatgttcctggaacttcagcctttgcttggctcaggagcctgaactccccaggatgtccaggagtgtccgaaggagagaatacagtcacaggttcttagtttctgtttctggttgggccagtaaagccccttcctcatcccacttttccacttactactaaagacagaaaccaaaaaccatggcttcaggctgctaaaaacctaaaacaaaacagaacaacaacaacaacaaaataaggcaggttggacaagcttagtcatagagtcaaagcttcctgcacgcaatcgtgtgcctttctggagtcccaccacgctttcccttcgtatttttgtgtctcttctcagattcttcattgtctttgatttccaaaggcactgccaaggtcagactgctggtcatgtgcaccctgtgttcctcccctcccggtcttcctgagaagtcatggaaatcttagctcctccagcaagaacacatgtgtctttcatttgaaagattcatgcctctcctccatgtgaaagccgattaatgctcataaggaagggggtgggctctattcttggccgatttgtctccccagactgtccctgtgaaaggtctttctgtattcacggcctcattgtacgactccactttcccggcaacaagtgcttggcagtgttcacccaccaaatgtgttagttttcaactgcaattgatcactttctccttcttgaaagtcttcttcgctggcatctgggcacattgaccctggttctttctctccctcctgttggtctctccttaagtgaattgttcctcacttccctgacctccaaatgttgcaatgccctagagatccattcttcccattgaaaactctccctgctatgtccctgaactacagcccagtctcatgactgtaaataccacttcagcgattcctaaatcattatttcaagcccagctctctcccctgaaatccaggctcctatctccagctgccgattcaccagtgccctttgagcatctaatcggtacacaaactcagtgggtccaagcaacacccgatcttccccccagtatctgctggccccatagacatccccgtctcagacagtggcacctccaccctcccagtggctcaggccatgaccactggggtcagccctcccttttctcctcctctcacacgacacgtccagtccacctacaaagcctgctggctctgcttcaaataacacacccaggcccacgtctcctcccacttccaccagcaccctcacctaagctgctgctatcctgaacctgggttaccgcctctgctggcctcctgctgggtttctctgcctctgcccttcccggcagcacccatcccaagaatgtttcccacacagctcttgtgttttaaggcacaagtcagatgctatcatccttaaagttccccagcggctcccatgtcaatcagtgtaaaattccaaggtcccatgtgatccaatccccctacttcatggaccacatttcctgtcactgcgccttggcccctcgctccaccctaccacatccgggttctgcggcccttggtccctctggctcacttttgcctggactcttgcgtgtgcatgcacgcttcccactgcccggtgctctgcccgcatggctctccgcagagggcatccttcattcctcgcgggtttctgctgcaaggctgccctacctgggctgccttgcctgacatactgttccccgtgcctggctctttcaattccacttgccctccctgatatgtctccattgtgtttattgcctgtctcccctcctgggctgtaaggctctgggggcgtatgctcaatgccgagtctctgaaccccaggatgggccccacacctggtgggcactgctaatgtttgctgcatgcacataacgtgctctttatggtcaccccctctccaggcaaactgttccggggagcattttcactctctgatatcctacatgaatgcacatgagtgagtgtgcattaaatacggtgattcccagcccagagcttttgtacccccaggggacactggcaatgtcaggacatctttttgcttgtcataactcaggtaaggggtagggtttgctagtggtttggatgctaccggtatccagtgggtaaaggccacagagtctgctggacagcttacaatgcctaggatggccaccatggcagagtcatccttctgaattgtcaacagtgctggaaggagagctggagaaccctgggctgtgtggtctgtttgcctgcagacatcagcaggacagccccatgggtgtagcaaagggaataagcacacaagcaagaagagagttttcaactaaaggacgatcaacgttaaaacttgttcagaagtatagcatctattattcaatgattagtaaagcagaaaataaagtcaaaaaaaaaaaaacttgttcagaaaggttgcttaaggccaggtgctgtggctcatgcctgtaatcccagcactttgggaggccgaggtgagcagattacttgcggccaggagttcaagaccaacctgggcaaggtagcaagaccctgtctctacaaaaataaaaaattaaaaaattaaccaggcatggtggtgcatgcctgtggtcccagctactcgggaggctgaagtgggaaaaacacttgagtccaggagtttaagattggggtgagccgtgattgtaccactgcactccagcctgggcagcagagcaagaccatgtctcagtaagtacatacatacatacatacatacgtacatacatacatacatacataaaaattaagattgcttataactttagccagttaagttttctcctggccgaggcttcattgggcctgtttgtatttgatgattttatttgactccagtgctcaatttcttctgtgttgtcagctcgggctaatgggacacagaatggctcatttttggctgtgcagttttctgtcttctgtgcacaacttaaaataattatatggggcactgtctgagcacaactatatgtaaattgtgccaaaatataaggaactatgtcccaaggtgccagctttttccttgtctgtttgtgttgttgttgagaaaaataatattaaaagttggcattttaaggcatatgttgcctacatctccattttgcctacacagtctaataaattttattagatttctcttatttgattgaactagaccccttccaagaacaaatcgcaggtaaaaagtcactaatattagaaagaaacacgtggagatattctccatgggaagcatctgaggtccctgcctctggggaactgtgtggggagcaggcattgctcgctgagcacctgctgcctgggctccgtgctggactctgcatggggacaccaggacagagaagatgtcaccgctggccgcaaaggcatctctggacttctgagtcagatacaacatacgcacaagtcactctaatagaaggcaggatctccaaggcatctcgggtgagatctagaggggagggaggggttgtacttggttgcaggaatcagggggtcttcaggaaagaagacatgccagccgtgggctttgaaggacaagtgggaggtcatcagagaccagggcagggccgccggggcaggcattcccaggacggggctcggcctagcaaagcccagagtcacactgtgggacaatgttgcctttgcgccatcatgcctgcctgcctggccgtgctgctgagtgaccagaagtgagacgtgtgctctttctttgtgcgattctttggcatcagatcaaggctctcatcaagaagtacatccagaggcagcagacgatcaacttggtggtggttccctgtaacgtggacattgccaccacggaggcgctgagcatggcccatgaggtggacccggaaggggacaggaccatcggtaagaggaaagaaccaagtggccgggtgcggtggctcaagcctgtaatcccagcactttgggaggccaagacgggcggatcacgaggtcaggagattgagaacatcctggctaatccggtgaaacctcgtctccactaaaaatacaaaaaaattagtcgggcatggtggctggtgcctgtagtcccagctacttgggaggctgaggcaggagaatggcgtgaacccgggaggcggagcttgcagtgagccgagatcatgccactgcactccagcttgggcgacagagcaagactccatctcaaaaaaaaaaaaaagaaccaagcttccagggcatccagggcatgggaagggagggagggatgccgcacttctttggaagatcctggaacgtatcatatgccagtgtgtcctgcgctgaatacaagtgctattgttcttgttccttaggaatggcttattgaggactgaagtaggtaatatcaactgcccagtagatggacctgagcatgtcaacaaagttaacactgaagaaaagaaaggaaagaaaaaaagttttctaaaaaaaaggatctatttgaatattaacatctccaaggaaacttagtactactttttaatagtcagttttctggtcctctcatcgccataaactcagataatcaacagttatcaataaatattagctttttttttttttttgagacagagtttcactctatcccccagactgaagtgcagtggcatgatctaggctcactgtaacctctgcctcctggattcaattctcctgcctcagcctcccaagtagctgagactacatgcacatgccatcacgcctggctaattttgtattttcagtagagacggggtttcactgtgttggccaggcaggtgtcaaactcccaatctcaggtgatccacccgcctcagcctcccaaagtgctgggattacaggtgtgaaccacagctcccagccagctattattattataaattcagtcaatcaatagtcatgggatatacatgttctgctcttagtatagcccaaaacaatattgtaaaataaatgcacattttctttttcttttttttttttttaacttgggatattttattttattgttaacttttgttttaggttcaggggtacatgtgcaggatgtgcaggtttgttacataggtaaacttgtatcatgggggtttgttgtacagatgatttcatcacccaggtatcaagcctagtacctattatttattttttctgatcctctccctcctccaccttctgacagatcctagtgtctgttattcccctctacgtgttcatgtgttctcatcctttagctcccacttataagtgagaacatgtggcatttggttttctgttcctgggttagtttactaaggataatggcctccagatccatcccacagaaatgcaaattttctatgcattctaggtcaagtatagaaatagagaaaagtgtgctaggcttaagagaaacagacccatgttcatagcagcattatccacaatagcccaaaggtgggagcagcccaggtgtttacagatggttggatggataaataaaacgtggcatatacgtaaaacaatattatttagcctcaaaaaggagggaaattctgaagcacacaacaacatgagtgaacttcaacgacattatgctaagtgaaattccagtaagaaaaggactaacactgggtgattctaccttatttgaggtccctagggtagtcggactcatacagacaaagtagaatggtggttgcccaagactggagggtggggaagtgggaaattgttgttcaatgggtgaagagctttagtttgggaagatgaaaaagttctggagatggacggtggtgatggttacacaacaatgtaaatgtacttaattacgcgaactataaactggctaaaataggaaaattcactttacgtacactttattaccatttttgtaaagaaattttttttaaaaaaacaaggtagctaaagacagagcaggggggagcatcctatttttatgagttgaattattcccttgcagacttgagttacgtgtattttacaattcttttaaaaaggaaattgaggccgggcatgttgactcatgcctgcaatcccagcactttggggggccaaggcgggcggatcacctgaggtcaggagttcgagaccaccctggccaacacggtgaaaccccatctctactaaaaatacaaaaaattagccgggtgtggtggcacaggcctgtaatcccagctacttgggaggctgaggcacgagaatcgcttgaacctgagacgaagtttgcagtgagccgagattgcaccactgcactccagcctggtgacagagtgagattctgtctcaaaaaagcaaaaaaaaaaaaaaaaaaaaagaaagaaagaaaagaaaaaaaaaagaaaattgaatgactacacaatacttccaaaggatgagaatagagcaaatttgattataatataacagtggcttagagaatatcaagtttcaaaaagaacagtgggtcgatattttcaggccctcactaagctggttccccacctgtccattgctatggatgttatctactcccttggcttcagccgagctcctgtgccctcttaagacagagactgctcctgtcgaggtcacccacaccctctgcactgaggagcacatggtcacgtctctgtccttgcctctcctttctcagcagcagtcaccccagttgcccactccctccttcctgaacctccctccttcctgaaactccctccttcctccaccattctctctctctcgggtcgcttccgtcactggccagctggaagtcacattcttagactccttgtctccatgcctcttcaattctcaggcctctaagtatggaaaacttggttctgggctctccttctatcaacgcatcatcacattaagtgatcttatccggctgtggtttgtaatcccatctacatgccagtgactcccaaatctgtatctctaaccctgaccttgcttaactggacaactccgtttggctgtctggccaatgtctccagttaaacgtgaccagaacagaactcttggtttcgtactccatcctgattcacctcctctccaaggcttccccacctcattcacagaacccatccgcccacccagttctaaagccaaatcaaagagtcccacttgagtcctccctccccttgcctccaagtctaatgtatctgaagtcctggtgactctgcctccaaaacgggtgccaaatccatccactgctctccatccccactgtcactgcctagaccaagccaccatggtctcctgcctggtctgctcaaacattctcctgctgttcgagcactcaccttgcccatggcagtgccctctccactggcctccagacatgtcaatcgggtcatgcccctctctgtttacattctctcctgctgccatctcacatgcatataaaccccggactcctttatctagaaagcagagccccaggtgacctggccctgcctgcctctctgatctcagttccaccgctctctgccttgctcatgaccctccaatacggctctgccatccctgctccctctcaaccagggtctggagtgctccttctccctccccactaggctgactcctcccttccttcagatgtcagtccaaatgttgccttctgagagcggacctccctgtccacccaacttgagactacatcacgcaccgctgcccacggtcatttgccagcacgtcactttatgttaattctctgcatagcccttatcaatatccattcttctttatttctcgtatattactagattaatttatctggaaagagaggttcaagaatagtagaccagatagccagacttacccacaaattaaaacgaaggacaaaatagcggaagataaggccaggcacggtggctcatgcctgtaatcccaacactttgggaggctgaggtgggtggatcatgaggtcgggagtttgagaccagcctggccaacatggtgaaacctcatctctactaaaaatacaaaaattagctgggcgtggtagcacatgcctgtagtccccgctactcaggaggctgaggcaggagaatcgcttgaaccggggaggcggaggttgaagtgagccactgcactccagcctgggcaacagagcgagactccatctcaaaaaagaaagagagagagagagagagagaaaggaaggaaggaagcaaggaaagaaggaaggaaggaaggaaggaaagaaggaagaaagaaaagtgcttttcaacatacacaaacaagaaatgcagtggcaatttgacactcaagcaacataaacaaaaaagagcacttggaattcaaagttttcaatccagtgcaagcaggaaggagtggggacagaggagggggagaggaaagtgggaaggaggagatcagaggaggtgcccacaagagggagcggagtgagtctgttcaggagacactagagagggactcccctcagtagggaacaaggcatttcttggaaacatggtgcatggagccagtccattctaaccatgcatgctgccttagtgctgggcacccagtaggcatccacgaaatatttgttaagtcaactatccaggacactgaatgaactgagtgagagggtgagatagcgagccaatagaaatgcaaagaagaggggcaatgagggaatgaggatggaatgaggcactggaggatcaagactgcagaagaccttgttggccaaaaaaggagcccatagtccagtaggagtcaaacctgtttgaggggatcactgacctttccatttcccttctttaaccatctcacaggtatcctgaccaaaccagatctaatggacaggggcactgagaaaagcgtcatgaatgtggtgcggaacctcacgtaccccctcaagaagggctacatgattgtgaagtgccggggccagcaggagatcacaaacaggctgagcttggcagaggcaaccaagaaagaaattacattctttcaaacacatccatatttcaggtgagactcttcaggaaagctctggaattagactccatgaaagccagcccatctgcaagagttggcccagatcatgaccaaagtgtatgcacaaattacacaaggtagtataacctagcctcacctgatttttgtgctagatttcttggcttatttagacaaattattgtttcttagattccaatgatggtgctgattaaaaactggaatgtgtcatgacataaagcgtagaactctttggtttcccaaaatgttttcacttcctttctgatttgagtccttatattaagagatacataaggcaggtgaagtttctcccatttccatggataagaataatgaggtcaaacaaatagtgaatgggaacaggactgaacacagagcacctaacttccagaaacccgtgtgtaccaccgtaaacggcacacaggaaaacctgctcgatggaactctccgtgtttttagagcctccagtgcccacagtcatttgccagaatatcacttgtttttattaaatagaaacttaataataactggctttattaaatagaaattatcctatagagactctgtagtttgtaggacgctgggattgttcccattgaatggagcacttttccccttcattctggaacttgttgttcctgaatgatccaggagcacagaggtcactcctgcttgaaggagagctaatgggaaaactgaatttgggccgagtaggtctacggcttgctgactatgtgatcttacaatatgggccaccttctcggaattttgcctttcccatcttctccaggggatcctactactgcctcacaagattgtggttaggattacgtaacacgacatacacaaaggtcttgagcgccaacagccagcactcagtaaacaccacccggttccttctttcttcctctctgctcctgctctgagtggatgaaacatactgtttccaatagcactggaggacatgaggagaagaaaactctcctccttgagctgggagaagatttcaaaataatcaggcccatggttctccatgctgagtgagcagcagactctctggagagttccttaaaattgtgctagctctgtcctgctctgccctgaggccgggggaggtgcccaagacttcctgcttctaacaggttcctcctggttgaggctaatgttgccagtccagggacctccctttgcaaaccgcttctcaaggtctttgggaaatctgaaatccttgcatgcctgcttgctgggagccgtcccttgcagtaagaggcactggcagtgctggggaataatcctgtgtgcttcatcctaaattcctgctattggcaaacatgctgcagccacgctgcctgctgtgtggctgcagcaagcaaatgcagcaagctgcttaacctttctgtgtctcagcctttcttgctctaaagtgggttgttaaatgactaaatgtgttaatatttataaagcccttagattggtgcctggcacttagtaagcaccatatatacttttgtgatgagaaataaaatactaatctgggcaactcacttaatctccatgaggctgggtttgttttcctgtagctaagatgacctacctcatgagtttgtggggatgatagaaagggaggagggaaggaagcttcctggcccacagttgcctgggtgcaggctggtggcaagtgtctttcttatgcaccacttggcttttctgatggcacgtgttgccccggggagctgggctcacctaccacgcacaaagtccggtactagcaagatggtacacaagtccttcctgaatgcatgaatgtctgtctcatttcagagttctcctggaggaggggtcagccacggttccccgactggcagaaagacttaccactgaactcatcatgcatatccaagtgagccacgtgggttgggtgacaagtcatcaatacagcatgcccaagtcactctcttggtctggagttggctaagatgccccactgatctgtccaaacaagcaaacaagtaccctctgaacactgtctcactcactgtcacaggctcactggaagaacttccaaattggggaagcaacaagtacatagtattaaaacaaatgtttgaattggtcaacaggggggaaaaagaagagaaggaaacagtttagcaatataaaaaggagtgaccactgagagagcaagttttcttttttcaatatgttgttaatacttcctggtataaaaaatttttcttgccaggcatggtggctcatgcctgtaatcccagcactttgggaggctaaagccagtggatcacctgaggtcaagaattcgagaccagcctgaccaacatggagaaattccatctctactaaaaatacaaaattagctgggcatggtggcacatgcctgtaatcccagctactggggaggctgaggcaggagaatcgcttgaacccggaaggtggaggttgtggtgagccaagatcgtgccattgcactccagcctgggcaacaacagcaaaattccatctaaaaaaaaaaaatttcttctagcctcaaacttctaagaaataattggtttgtaagaaataagtccatttttatggattctcaaaagcagacaactacagacaagggcctcatgacatcatcgattatagaaaaactttggtttggcggttattgagaaatcgaatatttttagtgcttgcctaaaccttcacaaatgaggccaagcaacatgggaagatttaaatgtacccttagagcaaagatgattccagatcctaggacttggcccatgctaaattgtatatcagacaaaagcaatgacttacttgagccaggaagcacatactcaaagaaaatttggtttgaaggagccagtggttctccaactttaaggcacacaagaattacctggaaagtttgttacaattagattccaccagtcaaggtggcctacacatgtaatcccagcactttgggaggctggggcaggtgggtcaaaaattccagatcttcctggatgctttaaagggctcctactcatataccaaagaaatcagttggccaatctcttaagccgcagtttgattgtttgcaattgttttgtttagaaatcgctcccgttgttagaaggacaaataagggagagccaccagaaggcgaccgaggagctgcggcgttgcggggctgacatccccagccaggaggccgacaagatgttctttctaattgaggtgaggatttccgcaggactccacgtgacactgcatccttccctggtggccctgcagctgcccttccccttcttcacccatgagatgaggtgggcgggtggacatctccttgcaacgccggtcccagttctttcatatgatttccgcaaagactattgactttatatcattttcagaaaatcaagatgtttaatcaggacatcgaaaagttagtagaaggagaagaagttgtaagggagaatgagacccgtttatacaacaaaatcagagaggattttaaaaactgggtaggcatacttgcaactaatacccaaaaaggtaagttctgggcagggctccctgcaaaacagggtggtatttacccagaccagaggctatgtccagcacatgataagtgtgccaagagtggaacacgtccatccaagaccgtggaacccttggtaatcagcaactgtctctcaacgaacaaaacccagaaatatggggcatcgacctcagcaactcaacacagggcaattccactgcctctgatgtcctcgtgtcttgattttgttttgttttgttgagacagggtctccctctgttgcctaggctggagtgtagtggcgcaatcatgactcactgcagcctcaacctcccaggctcaagtgatcctcccacctcagcctcctgagtagttgggaccacaggcatgaaccaccatacccagataatttttgtacttttttgtagagataggttttcaccaccattgctcaggctgctcttgaactcctaggctaaagcaatccacctgcctcagcctcccaaagtgctgggattatagatgtgagccactgtgcctggccttgcttcttggttttgaggctaaatggcattccatgcccacctgaggaattcgcagagcagcccagggtacctcagggctgctatcctgagtgcctggagggaagcctgtgcccaaagcaggggtccagatgactctgggggccagccccacatgaaggctctccagccactgttgaattgagtgcacagctgccagctggccatggtgcctgttgtggacacaccaggcacggagccttcattagtagcagctaaacatcagcttggtagaaaaagtgacctgggatacttatttattttggtggcattgagacagagctcagcatgggtgccaggggaccaggggaggggggaatccacatgaaatcgtttaccatctccccctctggaaggtctggggtgtgatgatctggttttagcaataagtaaagactagatgaagtagcagttttttaactgctaaaatgtgcccagatcacccaaacaattccactcatcccaatcccccttctctttgcccctaattcaagatcagagagattcttggtttgacaagagcctgctggcttcacctggcaaagttctgattcccatgtgctccagcccaggttccagtagggcatgtgtgtgtgtatgtgtgtgtccattttcacacagctataaaaaactacctgagactgggtaatttataaagaaaggaggtttaatggactcacagttccacatggctagggagacctcagaaaacttaacaatcatagcagaaagcaaaggagaagcaagcaccttctttccaaggtggcaggagaaagagcaaggaagagctgccaaacactttatttatttatttattttgagacggagtttcactcttgttgcccaggctggagagcagtggtgtgatctcggctcactgcaacctcagcctcccaggttcaagcaattctcctgcctcagtcttccaagtagctgggattacagttgtgtgccaccacacccagctgatttttgtacttttagtagagatggggttttgccacgttgaccaggctggtctcgaactcctgacctcaggtgatctgccctcctctgcctcccaaaatgctgggattacaggcatgagccactgctcccagcccctaaacacttttaaactatcagatcctgtgagaactcacttaccatcatgagagcagcatgagaaaaaccacccccatgacctaatcacctcccaccaggttgctctcttgacacatggggattacaatttgagatgagatttggatggggacacagagccaaacacaatttgagatgagatttggttggggacacagagccaaacacaatttgagatgagatttggttggggacacagagccaaaccatctcattgtgtgtgtgctgttgtgtttttgttctggcacttggagaaaacagcactgtttacctccgtggaaagatccctccaacggtaaactgtggctgtatgcttgggaggtaaggggtacaagattaagtttccatattcatttaactgatcagatttttgtgtttagttttgtttttgtttttcagagacaggctcttgccgtcacccaggctggagcacagtggtgtgatcattcccagatagctgggactaaaggcacataccaccatgcctggctcatcttttttttatttttgtagagacaggatcttgttatgttgcccaggctggtctcggactcctggcctcaagtgatcctcccaccttgacctcccaaagtgatgatattacaggtgtgagccaccacacctagtttctaatcaggtttttttttttttcctaccagttagaaacaatagcttctctcttggggtgatgactttcaattgaaacacattttcatagaataagatttttttcccccaaaagtcagtatttcttaaactcctgttattagaccatgaatatttttctcattgtgaacaaaactccactttgcaacattgcctctgcgtacagtggggagcaagactttataaaactgttgctagctttacgacgtctgcagaattagcagaattcaccatggaggtctgtttgatgttgcagttaaaaatattatccacgaagaagttgaaaaatatgaaaagcagtatcgaggcaaggagcttctgggatttgtcaactacaagacatttgagatcatcgtgcatcagtacatccagcagctggtggagcccgcccttagcatgctccagaaagccatgggtgaggactttcaagcaggactcccaaaccatcactctcataccttccatagaccccagtgccttggagggagagattggaatggagttaccaaaccagcctgcagacacgctcactggtgtgctagattgctactctgtgtggtctgtgagccagcagcactggcaaggcctgagagctggtcagagctaccgattctgcccttctgcctgagaactcgtactgaggtttccaggagatggggaagcacactgagtgccataggcgttccatcgctgtccttcaaacacgtggaggaggcggggaagatggtttctcttgtctttggggggcaggcagagggtgcacatgcacttcatctgtatcacacgcagccaccaacacagccgcgtaaggcagcggtccccagtctttatggcaccagagactgctttcatggaagacaatttttccacagaccagtgaggggtaagaaggatggctccaggatgagtcaactgcattgcatttattgtgccctttatttctattattattacattgtaatatataatgaaataattacacagctcaccaaaatatagaatcctcattatggtgggagccctcagcttgtcttcctgcaactagactgtcccatctagcggtgatgggagacagtgacagatcgtcaggcattagattctcataaggaacacgcaacctagatccctcgcacgtgcagctcacaacagggtttgtgctcctgtgagaatctagtgccaccgcagatctgaaaagaggtggggctcaggcagcagtgctcactagctcactgcacacctcctgccggacacggactggaactggtccagcctgggagttggggacccctgatgtaaggaatagtcagaggctaacatgcacacaggcacgggaaatggacaggacctgcccaggctgcatgagggctggattgtgtggccctggaatgatgtcccaccctctcctatcgcggtttgcaggtctagggaactcagtctcctggaatgggtcagtgtatcatcagtcatcctccctgtgtctttaaccagttttatttctgcttgcattttactgatgttttcttcttcttctcctttttgctttttttggtcagaaattatccagcaagctttcattaacgtggccaaaaaacattttggcgaatttttcaaccttaaccaaactgttcaggtaagcacccagagttcacttgctagtcacctggaccactggctgtttaaccttgagagaagttggatattcactgtcatttggaaccatgaggccagggatgtaatggcaggctggcgaggctggcagggctggcggggctggtggagctggtgactccaggagcacctgcctgcctggcttctgctcaggaggcggcttcactccccaggagaaatgaaatgcggcccgtgccctgccatctgttctgcacgaccttacgcaggatgtggggctccaccgaggactggctggtaggctgaatctttttcaagcataaagcacagcattgtttactagtcctactcccaaatttgtatgtttgactcaaagatgttgccgtagctctgtgggtttctacttagcaactcttcccccgagttaccttcagcaaaggcaagagagggcatgtggcacttgggctgtagataaaattcctcttctgcccaggcctgggctggtggattgaaatctcattccatagtgcaggcaagcaagaaggacaattttcgtcatttttccgtcatataaattaatttcttctttcaccctttttgcctgttagtgaaaattaaatcccagttctgactcccgcccactttctcaggggctgtgtctgagtcccgggtgcctgctcatggggtgggtgacctgcctggtccccagtcaccaagatgtccattgtccttcccgggccttggtccccttggtccctgagctcctgcccagccccgccgggacacaggaagcactcggctgcaggcccaactgctctgggccatgggaactctggcatccaccaagggccttcacctcttttgtgctgcccttggatagacacagccttgcagcagctcccggctcctcaccagggactgcggggctctccaaggccatgacctgcacactgccctcagccacaacagagcctggggggctcgctgcctcctgtgtcacaaatcttgaggagtgcggcacaggccacttctgctcccagagggtctactgtcctttgttgtgtagaccgaaagtgactgaggcagatctgcctcgatccgagatttattttgcccaggtcgaggatgtacgtgggaaaaagaaatacaagttccagtgctatctgtgacctgtgcttttcctaagagggtttaggggaacttcagtatttaaaaaggaaagagcgagcaggtggggaagaaagaaggaaggagggtaggcaatgaggcaatgaggcagaggtcaccctcgtgtaaggctctgaccagcactcagtgaatctatgtgttaaatgtgaaaagaaaggcgtggagagaaagtcaatcatgcattcatctcgcgctcagtaaatctacattttacatcggataaagtgcacatgtgaaatcacagcttctgtttgggaacaaaagaaaggcagttaactttccctttagtatagtaagtttggggtcccaagaatctatttttctttcacagttgtcacatatactcaaaaaaaaaaaaaaaaaagaaaaagaaaaaaaaaagagaaagaacaaacaaaccagcacctgtgaaacttcacctctgaaactcactctctcactctcaagccactgcttctgccttcagttttaaaaagtctatttgaagctcaaaagcctaggccaggtgtggtggctcacgcctgtaatcctagcactttgggaggccgaggcgggcagatcccttaaggtcaggagttcgagaccagcctggccaacccggtgaaacccttgtctctactaaaaatacaaaaattagccagaaatcacttgaacctgggaggcggaggttgcagtcagtcgagattgtgccactgcactgcagcctgggtaacaaagagagactccatctcaaaaagaaaaaaaaaaaagaaaaagaaactcaaagccaggacatgacagtcttagttcaagcttctatcacaaagtcccacagactggatgtgtcttattaacaataaaaatttgtttctcatggttctggaggctgggagcctgagatcagtgtgtcggcatggtcaggtggcagtgagggctctctttcaggttgcggatggccaccaccttcttgtgtatcctcacacggtggaaagagcgctctctggggttgctttataagggcctcagtcacattcatgaggctctaccctcatgactaattgcctcccacttcccaataccattaccttcctactttggtttcaacatgtaaattggggggcaggggacacaaatgttcagtccatggcagtgaccctgtgaccccccttctctgctacatcacctctttctttcctttttttttttttttttttttgagatggagtctcactctgtcacccaggctgaagtgcaatggcgccatctcggctcactgcaacatctgcctcctaggttcaagtgattctcctgcctcagcctcccaagtagctgggattacaagcacctgccaccacacctggctaatttgtgtatttttagtgagatgggggttcgtcatgttggccaagctggtctcaaactcctgacctcaggtgacccacctgcctcagcctcccaaagtgctgggattacaggaatgagccatcgcacccggcctttttgagacggagtttcgctcttgtcgtccagactggagtgcaatggcatgatagctcactgcaacctctgcctcccaggttcaagccattctcctgcctcagcctcccaagtagctgggattgcaggcgtgtgccaccacgcccagctaattttgtatttttagtagagatgaggtttcacgatgttggccaggttggtctcgagctcctgacctcaagtgatccaccctccttggcctcccaaagtgctgggattataggcatgagccaccatgcccagccaacctctttcttccttgactgcatgggtgatgtaggagtcctgggattcctgggaaacaggtatatcacactattatcccagtgttcgtcagcactggaaccattctagcagaagtagcaccccaggaatgactgacaccgtcccaacagcatggactaagcctgttcctgttgaaggagcagaaagctggtggtgtaggagggactggggatggccagagaggaagaaagggcaggagagaaggtatgtcgcaagtggggagtgaggaaaccgggttcataaggacagaaagggcgaagtgggactttctaaaaatcatcatttcaagtctcaggacttctttgactatggattcgttttatttctgagttcaacataatagtacttccaaatttgtttaagccaacaggaaagaagaaaaagaagtaatgtgtttgtcttttttatctaaccagagcacgattgaagacataaaagtgaaacacacagcaaaggcagaaaacatgatccaacttcagttcagaatggagcagatggttttttgtcaagatcagatttacagtgttgttctgaagaaagtccgagaagagatttttaaccctctggggacgccttcacagaatatgaagttgaactctcattttcccagtaatgagtcttcggtttcctcctttactgaaataggcatccacctgaatgcctacttcttggtgagttcccggcggggcaggagccgtgctctctgaaatttgcagagctgagtaggggctatgctaacctagagaggctttgctgagggaaggagggagggaccactacaatgtattaagcccttctgtattatgataaactacttatatattttctcatttataattttacatgaaccctatgaaggcacttttaattaatttgcccacaatcaatttttaaagtggtagagcgtgtactcaaaattaattctgaccccaaaattccttatatttcttatgcggtccatgaattacaaaattactatgatcagaatacagcaaaatacaacaaacgtcaacgattgtgactataaactagctttccttggtgttcagaaggcactaacatgccacacttgccagccccacaagataggaatgaaatttcctttccctagattttgtgacccagtgaactttttggcctctgactgtctatccaatatgcaagtatcactgttcccaggaagaaaaaatagcttttaaactgcaaagacacccacctcccgaagccctttctcaatcagaatagagtggtttcccagccatgggcacctggctgccaggcatactggctatgcctatgaagaaggaatgaggggaggattcgaaacggccctggtgcatacccagaagggagccaggggagtcctgggctgggggagtttctccagcagggaggagctgtggggatgcccagaggtgatatgggcttgctagcctaccagggggcttcttagtgctagaggggatgcctggaagtaaagaggggtcagcgcaaatagaaccttcacggggcttgatgctgaccaccggagtggaggtgggcgagaccaccagggcttcgccaggcaaccatgtgcgcatccaggaactccatgccttctctctgcaaccacaggccttgggctgagaccactccagcaaacccttctttctccctcttccaggaaaccagcaaacgtctcgccaaccagatcccatttataattcagtattttatgctccgagagaatggtgactccttgcagaaagccatgatgcagatactacaggaaaaaaatcgctattcctggctgcttcaagagcagagtgagaccgctaccaagagaagaatccttaaggagagaatttaccggctcactcaggcgcgacacgcactctgtcaattctccagcaaagagatccactgaagggcggcgatgcctgtggttgttttcttgtgcgtactcattcattctaaggggagtcggtgcaggatgccgcttctgctttggggccaaactcttctgtcactatcagtgtccatctctactgtactccctcagcatcagagcatgcatcaggggtccacacaggctcagctctctccaccacccagctcttccctgaccttcacgaagggatggctctccagtccttgggtcccgtagcacacagttacagtgtcctaagatactgctatcattcttcgctaatttgtatttgtattcccttccccctacaagattatgagaccccagagggggaaggtctgggtcaaattcttcttttgtatgtccagtctcctgcacagcacctgcagcattgtaactgcttaataaatgacatctcactgaacgaatgagtgctgtgtaagtgatggagatacctgaggctattgctcaagcccaggccttggacatttagtgactgttagccggtccctttcagatccagtggccatgccccctgcttcccatggttcactgtcattgtgtttcccagcctctccactcccccgccagaaaggagcctgagtgattctcttttcttcttgtttccctgattatgatgagcttccattgttctgttaagtcttgaagaggaatttaataaagcaaagaaactttttaaaaacgtagccaggttcagtgactcatacctgtaatcccagtgactctggagactgaagcagaaggatcacttgagcccaggagttcaagaccagactgggcaacacagggagaccctgtctctaaaaaaatttgtttgtaagtagccagacatggtggtgcacacctgtagtcccagccactcaggtggctggagcaggaggatcccttgagcccaggattttgaggctgcagtgagccatgactgcaccatgtactacagcctgggtgacagagtgagagtgagactctgtctctgaatacacacacacacacacacacacatacacagagagagagagagagaacttcacaccagtgatcatcattatgggtaattttcttttcttcttcatgttttcctgtatgtttcaaatgatgaacatatagattccttaataaaaaggcaatagaataaatatcattgctgatttgttttaaaacccaagtttgagatggaaagagtgcctcaaaaacattcagctttgttcaggggtacagacgagaaagattacgtgaatttctttcttcatttgctgtaaaagatgttggaaaagaaagttcaagtcaaaaatcacagcttgaccagcatccccaagagctctcttgcagaggtctctttgatttgtgttcaaatgctagtgtattagtctgctatagctgccataacaaatatcacatgctgggtggcttaagctacagaaatttatttcctcccacctccagaggctggaagtgtctgagatcaaagtgttgctagtttggtttctcctgaggtttctctccttggcttgcagactgccaccttctcaccaggcctatgcttggcctctctcttttctcttacaaggatcccagtcctcttgaatcaggtccccacccttagggcttcatttaagcttgatcacctctttaaagaccctacctccaaatgcagtcacattgggagttaaggcatcagcatatgaatttgagggtgggggcataatttgttccattacagcaagtaagaaaatagacatgtgcattctgaacacaaaactcgagcaatgaccaaaaacttggaaaaaggtatctctaattcaaaaggcagcagatctggcctgaagcaaaccagatgatcatggaaaggctgacattgatcgattgcttgcaatcctccaaacgtggaatttgggaatatgttccagttatctattgttgtgtaacaatcaccccaaaacttaatggcttaaaacagcagatgtattctttctctggattctgtgggaagtctgtgttgttcctctgtgtgtctcacctgggctcacccatgcgtcacagtcacacagaagctagacaaggctgggaggtccaagggagcctcactcttcaaactacatttccataaggaacacttgggtttcattagcactgatttccaaaagtaagaatgtcaacctaaaaggaagaagctggctattttttttttttcagagggaaaatggtgggtaagaagcaggactaatgtgcagtttccacttggatggatagaacagcatgtggagactcacattgtgagctttttctccaagaaccaccacaggaacataccaggaaaaccaaaagaattcacagaccctttgaacaaagtggcttgtcactgcaaacactgtgagacagccaaaaaactgtgagcacccgaaatgtaagaggggaaagcatctccaaacacacatcctcactggggaacccaaaaatccagatcagaggggaaggatttaacagtatctagagctgaaataaatttagagagccgagtgaaatataaaagtagtagaagcagtgggaagagccctgcaggcactcctggtccccagggaaacccagggaagccatttctgactttaatctcacaggggtccctggggagggcagccagtggaagtggggaagggccacagggaggagacttccagctgaactttgtaataatgctgactgatcgtgagttttcctggacagcatccagggcagggagaaggggaaatgggaagtgcaggtaggagcacagaagccatgacggggaggggaggggcatggcctgaaagccctgcttgctttctcaatagggaggcttgtaacctgcggcaagatctcagtcctgtgcactacaggcatggatataaaatcggctctgttggatgttgggggagcatggtgggagtgagactggccttcttggctgcatggaagctggatgagacctgtcactgccagctttccctcaccttcctggtgtcctgtatgacacagcagaagcagacataatccccctgggaatgtatctccataagcctgagaagcacaccccatcactcacagcagccataacaagctctgcccaaggagaatctgagctcagacatgcctaaccctgccccacctgatggtctttctctacctgccctggtattcaaagacaaaagacataatctcgtgggagctctacggccccacccatcacttaagaaacagaaatacttacccaggcaaccttagggcaagcttgtatcctccctatactgtggcagctattgccctctttgtagcgccacctcttggctggaggccaacccactcaagccattacagcaactcataacagaacaaccctgcccctagagaaaaagaaaacaacagctaattccactgcctgtaatatcctggctagccagaggtcctgaatctgtccacatgacaacttcactgctagcataaccagcatttgagaaaaccagcacactaaacaaaattacaagcaaggacactcacagagcccacttcactcccctgctacctccaccagggcaggtgctggtatctgtggctgagagacctaaagacgtatcacatcacagggcttttttcacactctcagtaccagctcagagcctggtagctccactaggtggctagaccttgaagagcagtaacaatcactgctgtccagctctcaggaagtcccattcctaggagaagggggagagcgccacatcaaaggatcaccctgtgggacaaaagaatctaaacagcagcccttgagtcccagatctttcctctgacatagtctgcccaaatgagaaggaaccagaaaaacaattctggtaatatgacaaaacaaggttctttaacaccctcaaaagatcacaccagcttaccagcaatggatccaaaccaagaataaatctctgaattcctagaaaaagaatttagaaggttgattattaagctactcaaggaggcacgagaaaggtaaatactaactaaaagaaatttacaaaataatacagaatatgaatgaaaaaatctccagagaactagataacataaataaaaaacaatcacaacttctgaaaattgaagacacacttaaagagaaatggaaaacacactggaaaaagtttcaacaattgattgaaacaagcagaagaaagaacttcagagctcagacacaaggctttcaaattaacccaatctgacaaagacaaagaaaaaaataattgtaatgaacaaagcctcagagaagtttgggattatgttaaacaaccaaacttaagaataattggtgttcctgagtaagaagaaaaatataaaagtttgaaaaacttatttgaggaaataattgagaaacaattacctgatgttgctaaagatctagacatccaactacaagaagctctaagaacacctgggaaattcactgcaaatagatcatcacctgggcacatagtcgccaggttatctaaagttaagacaatggaaagaatcttaagaggcataaggcaaaagcattagggtgaaagaaaaacctatcacattaacagcagatttctcagcagaaacactacaagctagaaaggaatggggtcctatctttagcctccttaaacaaaataattatcagccaagaattttgtatccagcaaaactaagcttcataaatgaaggagaaatagtctttttcagacagacaaatgctgagagaattcaccattaccaagccggcactacaagaactactaaaaggaattctaaatctcgaaacaaaacatggaaatacaccaaaatagaacctccttaaattataaatctcacatggtctataaaacagcaacacaatggaaaaaaaaaacaacgtattcagacaactagcataataaatagaatagtacctcacatctcaacactaacgttgaatgtaaacggcctaaatgcttcatttaaaagatacagaattgcagaatggataagaattcaccaaccaagtatctactgtcttcaagagaaacatcaaatgcataaaaacgcacaaaacttaaggtaaaggggtggaaaaagatattccatgcaaatagacaccaaaagcaagcaggagtagctattcttatatcagacaaaacagattttaaagcaacaacagtttaaaaaaaaaagacaaaagagggacattatataatgataaaaggactagtccaacaggaaaatatcacaatcctaaatacatatgcacctaacactggagctcccaaatttataaaacaattacgactagacctaagaaacaagatagacagcaacacaataatagtgggggatttcaatactccactgacagcactagacaggtcatcaagacagaaagtcaacaaagaaacaatggacttaaactataccctagaacaaatggacttaacaaatatgtacagaatattctaaccaacaatatacattatattcatcagcacatgcaacattctccaaggtagaccgtatgatagtcacaaaacaagtctcaataaatttaagaaaattggaattatatcatgcgctctctcggaccacagtggaataaaattggaaatcaactccaaaaggaactctcaaaaccacgcaaacacatggaaattaaataatctgctcctgaatgattgttggatcaagcatgaaatcaagatggtaattaaaaaattctttgaactgaatgataataatagtgacacaacctgtcaaaacctctgggatacagcaaaactggtgctaagatgaaagaccatagcattaaatacctacatcaaaaatagacaagcacaaatggacaatcttaagtcacaccttaaggaactagagaaacaagaacaaaacaaacccaaacccagaagaagaaaagaaataaagatcagagcagaactaaatgaaattgaaacaaaaaaatacaaaagataaatgaaacaaaaagcttgttctttgaaaagataaatgttgatagaccattagcaagattaaccaagaaaagaagagagagtatccaaataagctcaatcagaaatgaaataggagataatacaaccaatagcacagaaatacaaaagatcattcaaggatactacgaacacttttatccacacaaacgagaaaatttagaggagatggataaattactggaaatatacaaccctcctagattaaaccaggaagaaatagaaactctgaacagactaataacaaggagcaagattgaaatcttggcaatttaaaaacttgaaactattctaaaagatagagaaagagggaatcctccctaaatcattctatgaagccagtatcaccctaataccaaaaccaggaaaggacataacaaaaaaagaaaactatagaccaatatctctgatgaaatacgtaaaaatcctcaacaaaatactaggtaaccaaatccaacagcatatcgaaaagaatccaccatggtcaagtgggttttataccatggatccagggatgttttaacatatgcaagtcaataaatgtgatacaccacataaacagaattaaaaacaaaaatcacataagcatctcaatagatgcagaaaaaacatttgacaaaatccagcatccctttatgattaaaaccctcagcaaaatcagcatagaaaggacataccttaaggtaataaaagctatccatgacaaacccacagccaacattatactgaacgtggaaaagttgaaagcattccccctgagaactggagcaagataaggatgcccactttcaccacttgtatctattcaacatcgtactgggagtcctagccagagcaatcagacaagagaaagaaataaaaggcatccacatcagtaaagagtaagtcaaattatcactgttcaccaatgatatgattatatacctagaaaaccttaaaatacttgtccaaaaagctcttagatctgataaatgaattcagtaaagtttcaggatacaaaatcaatgtacacaaatcaatagcacttctatacaccaacagtgaccaagctgagagctgagagtgaaatcaagaactcaacccctttcacaatagctgcaaaaaaaaatgaacaaacaaacttaggaatatacttaaccaaggaagtgaaagacctctataaggaaaactacaaaatcctgctgaaagaaatcatagatgtcacaaacaaatggaaacatatcccatgcacatggatggatagaatcaatattgtgaatatgaccacaatgccaaaagcaatctacaaattcagtgcaattcccatgaaaatacaaccatcattcttcacagaactagaaaaaacattcttaacattcatatggaaccaaaaaaggagcccgcatagccaaagcaaaactaagcaaaaagaataaacctggaggcatcatattacccaacttcaaactatactacaaggctatagtccccaaaacagcatgatactgatataaaaataggcacatagaccaatggaacagaatacataacccagaaataaagccaaatacttatagctgactgaactttgacaaagcaaacaaaagcataaagtggggaaaggacaccctattcaacacatggtgctgggataattggcaagctacatgtagaagaatgaaactggatcctcatatcttgccttatacaaaagtcaactcaagatggatcaaagacttaaatctaggacctaaaaccataaaaattctagaagataacattggaaaaacccttgtagacattggcttaggcaaagagttcatgaccaagaacccaaaagcaaatgcaacaaaaatgaagacaaatggatcggacttaattaagctgaaaagcttctacacagcaaaagaaataattagcagagtaaatagacaacatacagagtgggagaaaattttgcaaactatgcagccaacgaagggctaatatccagaatctacaaggaactcaaacaaatcagcaagaagaaaacaaatactccctcacaaagtgggctaaggatgtgaatagacaattctcaaaagaagatatacaaatggccaacatataaaaaaaaatcaacatcactaattattaggaaaatgcaaatcaaaaccacaatgggataccaccttactcctgcaagaagggccacaatcaagaaatcaaaaaataatagatgttggcattaatgtggtgaaagggatcacttttacactgctggcaggaatgtaaactagtacaaccaatggaaaacagtagagtttccttaaataactgaaagtagatctaccatttgatccaacaatcccactagtgggtatttagccagtggaaaataagtcattatatgaaaaagacacttgcacacacatgtttatagcagcacaattccccaagtgcccaccaatcaacaagtggacaaaatgttatatatatatgtgtatatatatgtatatatatataatgtgatatatatgtatatatatgtatatatatataatgtgatatatatgtatatatataatgtgatatatatgtatatataataatgtgatatatatgtgtatatataatgtgatatatatgtatatatatataatgtgatatatatgtatatatatataatgtgatatatatgtgtgtgtgtatatatataatgtgatatatatatgtgaatactactactactactactactactactaatactcagccataaaaaggaatgaaataatggcattcacagcaacctggatggagttggagaccattattctaagtgaagtaactcgggaataaaaaccaaacattgtatattctcactcataagtgagattatacaagctatgaggatgcaaagtcataagaatgatacaataaacattgggaactcagggggaagggtgagggtggggtgagggataaaagactagacatcgggtacagtatacactgcttgggtgatgggtgcaccaaaatcccagaaatcacgattaaagaacttgtcaatgtaaccaaacaccacctgttcctcaaaaactattgaaataaaaaataaatacataaaagaagttgaggttaaattaatctaagtagggagtgcatttgggccaagcttgaggattgcaacgttggagcacagatttaagttgccctgaatctacactctgataagtggcatttataagtggatttttaaaggcaaaagggggagacagggagagggctgatacaaagctgtttgtcaggaattcttattggtttacagaaataacattgataagtgcttattagtccattttcatgctgctgataaagacatacctcagactgggcaatttacaaaagaaagaggtttattggacctatagttccacatggctgaggaggcctcacaatcatggtggaaggcaaggaggagcaagtcacatcttacatggatgacagcaggaaaaaagagagagcttgtgcagagaaactcccttttttaaaaccatcagatcttgtgagacccgttcaggatcatgagaacagcacaggaaagacccacccccaagattcaatcatctcccaccgggtctctcccacaacatgagtgaattatgggagctacaggatgagatttgggtgaggacacagagccaaaccatatcagagtgattgactatacattgttaagctacagggtgtggattacagcgtccagtgtggcattattaggttaatccatagctattaatacctgtggcaatagtaagaggtttcaagagatgaacacacagctgaaagtggggagtagggagtggttgctgtcttattttaatgtctctctgggcctgataattttaaaagccttgcattcttcggatacaagttcctttctttttttcaagaacaacagagaaaggctgcctggctacctttacctgcagcacctctgatagtggctgcttggcagctggttaggtaaacccaatttctactggataaacttcatggacattcacccatgttagtactggggaatgctctgaaatagcaaacttgtccatacagctcccttgctgctcagagggtctggagaggaacagcagaggcccagccccaaatacttcttgtaccggcttctattatgagaggtgatggcacctttaggcacttatatttcaggtagaaggagcaggaataaagaagagagggccacaatctgaaatatcagttctggatctccctgggggcaagacactggcccttagctgagctattctgtcatcactgtgagccctcatgctcgacctcaccggagcacccctcgatcatgtgctgaatgcctagcacgcgcctggcactgtggggtacagaaatctagagcacagagctgagttttcagggcttagctgtcctcacatctgtgacacaaacaaggatcaaggaaagttttgtttttgttatttttatttttttttaagttggggccttactctgtagcccaagctagagtgcagtggtgcaaacatagctcattgcaccctcgaactcctgggctcaagtcatcctcccaccttggcctccagagtagctggaagcccagctcaaggaaagcattaacatgttctacttttcaccataactcctgtgtattgggaaatggaaaatgagcttttgaagtggcctattcgcttcctccatgagtacttcctgaacactttcctcttggccactgctcccaagaccccctcaaagtctctctcctggacttccagcttctggaatgagccccaagagtggcacttagctccagctcctagtagctcactccttccttgctcacctgtgccccccacctgtctccttaggggcagtggctttgtcttactcatttgcatatcacaaatgtccagcatagaagccagcatggggcccagtaagtgtttgtggagaaagaaagggaagaggtgaagaagggaggagacggagggagaaaaggagggcaagagaggggatgtcatgtcatgtcatgtcatgtcatgtcagttctcccttcctagatctggacaagggaaagaaaagcaagcaagcctgaccgcctcagtgcagaccctctaagatgcaagccttccccaggtaagacagttccgcagggtgcttctgtgggctggctttctgagcagccatctcaaagtatgcgaaagaaatagattttgggccgggcacggtggctcatgcctgtaatcccagcactttaggaggccgaggcgtgtggatcacctgaagtcaggagttcaagaccagcctggccaacatggtgagaccttgtatctactaaaaatacaaaaactagccgggcttggtggcgcatgcctgtagtcccagctactcaggaggctgaggcaggagaatcgcttgaacccaggaggtaaatgttgcagtaagccgagattgccccactgcactccagcctggatgacaagagtgagactccatctcaaaaaaaaaaaaaaaaaaagattttaggggtaaaatattttgctttccttcagtggctgggccacctgtacacaatgcctgaacccaggtcctgcagcccccagcttggctctccaaagctcaccagtatcaaaggatttcagcttctgctcctctccgcagggctctctggtgggccccagacagagatgaaggaaaagtctggccttgaccttgaggaccaaaagcgaccacgtcagacgccagcagtctcgtgcccagttgccaagggatcacctgaggaaggcccttaaaatacaggtggtaatgcaggggtcttgggatggccccggaccgttcatttctaataatttcccaggtgaagccaatgctgctgttccaggaaccaccctttgagaagcacgggtctataccacacgcacagaagaggaaacgaaacgaggcaaaggaaaccagtccctttactcgcgcccaggcaggacaaagcgggcaagggtgggggcgggggcgcgggcgcgggcgcgggcaggcggacggacttgcaggaaatgcagccgggaggatgggcaggttgtgggatgctccgccgttccgcgaccacccgcctccccggcccagcagaaccgggtccaggctgggggaggtgctagcggtgtatgtgagtaacactgccccctcgtcgtggcaccgcccccttcttccctgcccccttccccgccccctggattctgaagtctgaagtcatgcaatttgacttttcctttctggaaaccagcgagcagaaatgaaaccgaaactgaattgtccgggaaattcgcggtgggggcggagagcgcagggagaagtaagcccagtgcaggatcctgaggcccgtgtttgcaggaccagggccggccttccgattccccattcattccagaagcaccgaaccacgctgtgcccggatcccaagtgcagcggcacccagcgtgggcctggggttgccggttgacccggtcctcagcctggtagcagaggccaggccagtgccacaaggtcaggctccactgggccctgcccgcccaggagcctgtggtgtcaggcacctgaaggggtgggttgcccctccacacctgtgggtgtttctcgttaggtggaaggagagacttggaaaagaaaaagacacagagacaaagtatagagaaagaaataaggggacccagggaaccagcgttcagcatatggaggatcccgccagcctctgagttcccttagtatttattgatcatttgtgggtgtttctccgagagggggatgtgtcagggtcacaagacaatagtggggagagagtcagcagacaaacacgtgaacaaaggtctttgcatcatagacagggtaaagaatcaagtgctgtgcttttagatatgcatacacataaacgtctcaatgctttacaaagcagtattgctgcctgcatgtcccacctccagccttaaagtggtttttccctatctcagtagatggaacgtacaatcgggttttataccgagacattccattgcccagggacgggcaggagacagatgccttcctcttgtctcaactgcaagaggcatgccttcctcttatattaatcctcctcagcacagaccctttatgggtgtcggactgggggacggtcaggtctttcccttcccacgaggccgtatttcagactatcacatggggagaaaccttggacaatacctggctttcctaggcagaggtccctgcggccttccgcagtgtttgtgtccctgggtacttgagattagggcgtggtgatgactcttaaggagcatgctgccttcaagcatctgtttaacaaagcacatcttgcaccgcccttaatccatttaaccctgagtggacacagcacatgtttcagagagcatggggttgggggtaaggttatagattaacagcatcccaaggcagaagaatttttcttagtacagaacaaaatggagtctcctatgtctacttctttctacacagacacagtaacaatctgatctctcttgcttttccccacaggcacctaagtccacctgggcctggagcaggacaggttgcaaaagaaaatatctcgggacccccaaactccttatgctaagggaaacatcgagcctgggaactgagccatcaacgctgccattctttttcccaaacagaaccctgttgtcagaggtacacccagagcaactccacaccgggtgcatgccacagcaactccatcttaaataggagctggtaaaacgaggctgatacctactgggctgcattcccagacgggtaaggcattctaagtcacagggtgagataggaggtcagcacaaggtcataaaggtcataaagaccttgctcataaaacaggttgcaataaagaagctggttaaaactcaccacaaccaagatggccacgagagtgacctgtggttgtcctcatttttacactcccaccagcgcatgacagtttacaaatgccatggcaatgtcaggaagttaccctacatgtatgtctaaaacggggaggcatgaataatccaccccgtgtttagcatatcatcaagaataaccacaaaaatgggcaaccagcagccctcagggttgctctgtggagtagccattctcttactccttcacttcaggcaggggagatgaatttccctttgagcctgtggacagagggcagcctggcagagggacaggcatcaacaaagcctctgagtgtgacctgggtcctgagttcagggatggcaatggggtaactgagactggatcagaagttgcctggaagaagagagggccattatcagagtataagagtgtgaaacttatctggtaggaaaaaaaaaagagtaactgctgttcgtttaatagagcacacatcctctgcaattcaggtgggaggttgtgagcttcttaagtacagaagctgcctcttgatttcagcatagcgaggaggtgctgaagagcgcaggtttggagaatgatcacctggattggaaccatagctctaccaatatggaacccagctccttaggcctcggtcttctcatggagaacatggtgtgataatcctactcctctgggagggtggctgttaaggtgagtgattgcacacgagtccctctagctgatgttaccgagcggtccttgtttttagagctcccaagagggtggcgggccacttccaagatggcggcaagcctcttgttctctgacctggggttcttggcctcacagattccaaggaatggaatcttggggcatgtggtgagtgttctcattaggacgaacccaggcacttagacatgcgggaacaatggcgagcctttagcccgaatgggagcggcaatgggtgcctcgctggatcaggagcacagcggacacactgccggatccagaggggtggacatcagtggtgggtctgtgatggcggcaaacaacagcagacagcaaatggcagtggtggatggcaagcgaaagctcagctccagccataacaaacacggaccagaagagtgtgcagttgcaagatttaacagagtgaaaacagacgtcccatacaaagggagggaacccaaagggggttgccattgctgggtcgaatgcctgggtttctgtctcaatcactgtccctccccctgtgctctcaggcaatagatgattggctatttctttacttcctgtttttgcctaattagtattttagtgagctctctttactacctgattggtcgggtgtgagctaagttgcaagccctgtgtttaaaggtggatgtggtcaccttcccagctaggcttagggattcttagtcggcctgggacatccagctcgtcccgtctctcactgacacctaacacatcctacatgctcagtagacaggagctattattgtatgactgactgctgaattacaccccaaaacaaccacctatactccccaaggccctgccatatcatatgcatattagaggcaatgaagcaccaaaatctaaggccagggaaggactgcggtggacaagggaagtgcctagggcgttaaaacttaaggaggcattgcaccaactgggagtgagctgtgtgtgctgtgtttcctgggcagggcgcctcactgcccttccgagtcctgccctggctgaggttgtgcctctatctggttatcagttgcctgcagctctttctgattttgttcgtgaacaagggcccttagggaagcctcccgctgttggaaacagcagcagcatcacccagagtgaagtctctgttcacatgagtgccagctctgctcacacctaccctgcgttcccaaggcactgttcctgcttcagaaagcatcagcccagcctgctcacagtcccccaggatgtgctgttgcctgggttcttgactaggaagtaaaaggcccagaggggttgagtgtgtgtgtgtgtgtgtgtgtgtgtgtgtgtgtgttaaagtgaggtcattgctaattcctgggagaacttgtgttccccttggatgaaccccttggatgaagaaccccttggatggggttgcccagccctaggagtggatcctgcaaagcaaaatagatttcagcacagggagctggctggggggctcctccccctcttgtaggtgcagcagtattgaatttgattccatccaggtttcccctgaccccaggacctaaagctggggcaggttctgggccttgaggttggttgggggtgacccttcctaatcatggaagtctttagcgggggcttgtaagggactgtgagctgagctaaggagaatggaggtggggtgccaaccgctcccaaagggaaatgccatctcccactcacagccagttagccgagaatgggagctcccaaagggaggaccacccatgggtctgcttgactcagccctccccaacccctttcacctttgcagtaaaactctagccaaggaagacaaagagacctttggagaccaaaacagaacttttaattcgggccaacagcaggctcatgcccaaaatggctgccaaccccaacaaagaaagcagctagcttatatgtcgtttgagatgggaaaaacaaggtaggatacaggtttcagacaaagacagtaaattacttaacccgtgacaattctgaggaaactggcaattcagttatattgactagtcatcctccaagctggactagggttggaggctggggtcccgaggcaggtgataagcttttgagataagcttgcatctgcaacttgttacaatgctgggaggggctgcttaaaattttagcctatgtgttacttctaaatagcttatactaaatgttaactgttttcatgtgcgtccatgtgaagagaccaccaaacaggctttgtgtgagcaacatggctgtgtatttcacctgggtgcaggcgggctgagtccgaaaagagagtcagcgaagggagataggggtggggccgttttataggatttgggaaggtaatggaaaattacagtcaaagggggttgttctctggtgggcaggggtgaatctcacaaagtacattctcaagggtggggagaattacaaataaccttcttaagggtggggaagattacaaagtacattgatcagttagggtggggcaggaacaaatcacaatggtggaatgtcatcagttaaggctgtttttacttcttttgtggatcttcagttactttaggccatctggatgtatacctgcaagtcacaggggatgcgatggcctggcctgggatgcgatggcctggcctgacaactattacctatgttatgtttattattttaagctttattattactattttatttattttattttattttccttccacacacccgtttccaccctggagaggccagatgagccagactccagggaggcctagaagtgggcaaggggaaacgggaaaggaggaagatggtatgggtgtgcctggttaggggtgggagtgctggacggagttcgggacaagaggggctctgcagccattggcacacaatgcctgggagtccctgctggtgctgggatcatcccagtgagccctgggagggaactgaagacccccaattaccaatgcatctgttttcaaaaccgacggggggaaggacatgcctaggttcaaggatacgtgcaggcttggatgactccgggccattagggagcctccggagcaccttgatcctcagacgggcctgatgaaacgagcatctgattcagcaggcctgggttcgggcccgagaacctgcgtctcccgcgagttcccgcgaggcaagtgctgcaggtgcggggccaggagctaggtttcgtttctgcgcccggagccgccctcagcacagggtctgtgagtttcatttcttcgcggcgcggggcggggctgggcgcggggtgaaagaggcgaagcgagagcggaggccgcactccagcactgcgcagggaccggtgagtgtcgcttctgggggcagcgcccagtaaccgcgctaggagcgcggagaagggcattgggagagcggcgttcgtggcggagactagcgctccggagcacgggcacgacgggggcaccttctcggctgctagtaactaacaataataataatcataatcatagcaagggcgctgatgggcgggctcggagcacgcctgattctggttcccaccaggctgcccaggctcctgatgacgcatcagaaacatccccctaacccgcggccttcctgcaggagaggttgggaaggggtgggggacggggctcgggggaggtctccgagggactctagtaagcggggaagggcgccgggaaagtttcagatccacggctgcgcgggccacgagcccacccgaacgccgaccactgctttccgtcgacttctatttcctgggaacgcgcgaaagcaaacccaagtcagactgcggaggtcgctggggagggaaggttcaaggagttctcgccgatcctgctgaataaagggggttccgagctgggccgagatggggcatgcgcgggaagacccctgcccgctgttcccccccaccgccccagtggatgccatgcctggggcctccccggcgcgtggggctgacgcaccctcggggtccatcgtagttggccgggatcgtggagtgggtgcggtggacgaagggaggcaggacagtcccgggggtggcagaaggagcccgggcacagctgagacctgcgctcccatcccaccaacactcacagcaggtgctgccgagctgggcaattgggatggcccaagttatttggttaaattttaaatcacgtttgttactgggaagtagagtccagtgatgctaaccgcgcctctacctccaccaccggtgtcagtcccaaagggctcctaaaatggctgtgtcatctttcagccttggaccgcagttgccggccaggaatcccagtgtcacggtggacacgcctccctcgcgcccttgccgcccacctgctcacccagctcaggggctttggtaggtagcagtgcatttggtctaaagggcaagatgttctctcttttattcataacaaatttaaataccagcagggtttggggggaaaaacgctttcagaagaaaaggtgaatgtcagtcctgcaagagttagttttaaaactagactgaattggcacatgtatacctatgtaacaaacctgcacgttctgcacatgtaccccagaacttaaaagcttataaaaaaagaaaaaactagactggattatgttgggaaagtgtagcctcttccatcttaggcatttcctagaacgtaggcagtaggtggtccttattaggagttttgggagaggaagggggctgaatcctacctcccatccctgctcctctatggggtctgagctgaggaagcttcaccacaaggagagaaccccctgacaaccctggatgccacctttaccctcactgcaggaattctgtggccacactgcgaggagatcggttctgggtcggaggctacaggaagactcccactccctgaaatctggagtgaagaacgccgccatccagccaccattccaaggtaaggcagaaatgaagtgggccgttgggttctttcttttctttctttcttttttttgagacaaggtctcactctgtcgcccaggctggagtgcagtggcgccatctcagctcactgcaacccccgcctcccaggttcaagcgattctggtgcctcagtctcctgagtagctgggattacaggcacacatcaccacacctggctaatttgtatgtgtttagtagagacagcatttcaccatattggccaggctggtttcaaactcctggcctcaaatgatccacccgccttggcttcccaaagtactgggattacaggcacgagccactgcacccagtcaggttcattttagttgttatgttaaccaggtttcctgcacctgtgcgctaactttcactttcccaaaaggtttcagggtgacccagcaggcaatgagtgattctcaaattcaggatttattgtgagagattcacacacacaattgagcagacattcacagtacaatgattaaagggagtgatagggtaaggacccacagtggaggctctggaggccagcccactgacagccactccagggagtccagaagtcccgctctagtgctgggtggtggagggaaatctgttcctccagggacctcgtcctcggctgcccagctgccaaagtcaggaataagctttcagaaatctcactgccaagattccgaaaacgcttcagacattgctagtcccttgtcgcttttgcgatcctccacaggtgtgcgtgccactgggtccttattcactggggtctctggtggcattgggccacagcaagtgttccctcatccccttagtctaccacacacatgcttaccactttgaagaaaaacccctttactatgagcgaaagtgagaaacacgtatgtttattgtttctaaagaaagaaacttaatatgggcttaatgctacctagtgagtgcctccattttgagacattagggtcacaagtcattattatatatcatgggcacaaacctgccctgggcagggacggaaggaagcccctgcacaggggcagttgctcaggatgtgagaagagcctggtgcataaccccatccatgcccacctaacatctcaggctctgaccagtggggctgtgcagtagcgagtggatggagggctggaaccctgcagcctcctctccaaacacagggtgcagccaagacattttaggagcaatttgggatggagagctaggagtcgccacctcttggctcttccaaggccggaactggtgcctgcactcagttcagtttgaagactgcagctggatgccaagttccatggaggagtaagaaaccggtttgaactcccgagattgccctgcccctgaaatccaaactgatgttccgaatgatcagggaaaggtacaaacgtttatggtttacagacaaaacccataaggtttagctttcagagaatctcattttatgaagcaaattagggaagggaatctactcaccaagtcctgtttcagctgattgagtggaacctgtggtcatgtggtacaagtcctggtctcaatgatgctccttatctggctgcagaaaggccaactgaggcaaccatagcccagaagactggtactcctgagaggcagatgaagtggtggtctttgatatcgagcctgggatgccctgggcacatgaggtatttccaaaggcatgggagttttagggaataaattcccagattgtcagactccataagtaccgtttacaatggattaccttttataaccatcccaatcctacctgacaaaagaggtgggcagattacgaggtcaggaaattgagaccatcctggctaacactgtgagaccccatctctactaaataaatacaaaaaattagccgggtctggtggcgtgcacctgtagtcccagctacttgggagcctgaggcaggataatcgcttgaacccgggaggtggaggttgcagtgagccaagattgcgccactgctctccagcctggtgacaaagcgagactgtctcaaaaaaaaaaaaaaaaagaaagaaatacatccctttcttcccttccaaatcgagcaaggatgcctgccctggaagtgtataaacccggggaagggagacagaaaaggatagttttaagtattggtgttggggacgtgttctttagccaaggcagcatgaacccatggcagcacttcccaaccttcctgacatgggcgtttctgtgaactccagtgtgatggagaaatggcattggctcaggtgtgcagctagatatgttacagagcagggtgacaggcaggggtgatgagttttgttttaacaacctgtcccttcaaccctcatggtactgacaaagatcacatggctctcgggggagattcctgcgaggggaagcaaggagagcatccttacatattattgatccaggcagcagatttgcagcaaagctctgtgctttattcatctgttaaaatagttaaaatagtcaaaacataggaaaaggattctgggaagtcagaatcggcttcagagcacacccctcctgcacttgcccggttctcagacttgggaatgggactgggtgggtgggtactctcgggtgttccgcgggtttgggtcttacttgtacactttgcttgatttcaaggaggtgcaggagaacagctctgtgataccatttaacttgttgacattacttttatttgaaggaacgtatattagaggtaagttggtgcatgctattttctgtaacatttattttgagtcataggagaaagattttcagttacttttatccaagattattagacactgtaaaatttcatatttaggcacttgtcctacaacattttaaaaatgaatttcaaatacatacgtgtgtatttgtaatgcagacaagtataaggcagtcagttacatgctttcaagagtaaaatgaatgacatttcatttcccccatttgtgggagtaaaagaatgacaatatgaaattgatgatcaaaagaaagagcataaaagatttagagctcacgtgttttttaaactaaaggtttgggtatcaaattaccgtaatatttggattctcttggctacattggaaacagttctataacaattttatttttaaatgtaaagtttttgtttgttgttgtttttaagacggggtctcgctctgtcgcccaggctggagtgcagtggtgcgatctcggctcactgcaaccttcacctcccaggttcaagtgattctcctgcctcagcctcccaagtagctgggactacaaacacacaccaccacttccagctaatttttgtatatttagtagagatggggtttcactatgttggccaagctcgcttcgaactcctgacctcaggtgatccactcaccttggtctcccaaagtgctgggtgggatacaggcgtgagctactgtgcccagcctttaaatgtaaactttttaattgtattacaactgcatcagaagttgtatactttgcaactattcaaatttatactgaaaacgtttttgaagttcaacctaaaattatgacaggagatagttttagaaaatattttggggaacagaggcatattctattttttttttttgagacagagtcttgctctgttgcccagactggggtgcagtggcgtgatctcagctgactgcatcctctgcctgccaggttcaagcaattctttgcctcagcctcctgagtagttgggattacaggtgcccgccaccatgcctggctaatttttttgtatttttagtagagacaagttttaccatcttggccagggtggtattgaactcctgacctcatgatctacctgcctcagcctcccaaagtgctgagattacaggcgtgagccccggggcccggcctggagggatattcttgaagcgccttgagcagggaggcagcgtttgtctttatctgaccttggcttctttgggtcactctgtttctctttccgtgaataaaaagccagtgagcacacactgtgtcccaggcactcttctacgctctggggacatcaccatgaacaactagtcagagtccccacctccaggggccttccgttctggtggtgggtttggttccatggttgaatgcacccagctgcttatctgttcaataggcatctgctttattttaagcttactttgcaaagaaggaagatggttgtttccgaagtggacatcgcaaaagctgatccagctgctgcatcccaccctctattactgaatggagatgctactgtggcccagaaaaatccaggctcggtaagttgctctctgaaagtcgctatccatgtgacatgagccatgcccattcgaggctgcccttttctacagcggtgctactgctgcccagatatgcctgctctctcgcctctcctgtgccaggacgcagatcctgaccctctacttgccagctgacaaccatgtatagactcgttgccttagctcaccgtgggtggaggtgctgctggggttggggacactggctgagctgtcgatgggttcagctcatctatactagaaggaactggcccaggccctgggttcaaggagcactaggtttgtttttcctgcccacatcatgattcagtctcaagctacaaaccctggggcatcattaagatattatctttgtagggaagccacgtggtgaattttttgcccagaatcaagacatatttttggtgggaaccaatcatggcccctggaatcagtccaacctcagttggtcccgacgctgacactctcagctgtgtgattgtgggtagttattcctcctgttataagcctggttttccatatctaaaatgagaataatggtctttgctttatatggctgagagcaaagtgcagggagtgtccaggtactcagagtgctcagtttcttattaccgtggatcactggtctgtttcaggctggctctgttttcctaggcaatgttaaacaatttttcaaacaatattcaaaaaacattgaagcgtttagaaaaatacagaggaccaccacctttccaccaccctgataccaccgtttacatttttctgcatttccgtccctggtgcgtctcttgtctggctgtaagagatgtaattatgtcagggtatggggcaggaggaactctcacccactcatacttgcgtgctttggaagcagcttggccttttccagtcaaggagaacagagtgtgtctcgtgatctggcagttccacttctggggatagactgtggttctcaaagtgtggcccccagcccagcccattagcatcacctgggaagttgactgaaatgcaaatgaccagcccctcctcccactcttagacctggtgaattggacactctggggcagggcccaccccctgtgctttaccaggctctccaggtgattctgctgtgtgctggagtttgaggaccatgtgtaaacccttgcacatccccctgggagccacatgcatagcagcactgtttataacagcaaaactcagaccctgtctacgtgcctgtcatggtggaatggatactgggagtgtggtatgttcatgtagcagaattctatacagtagtaaagaggaatgaactagagttccaggtatcaaaatggctgcatcaaatgaacaacgttgaaccaaagaatcaagttacaggaaatatacaaaatgattccacttacgtaaaattccccaacaggcagcaataggcaatataccattgtgggaaaaacatataggtggcaaaactataaagaaaagcaaggatgtgatgattgcaagcctcaggatagagggaccctctggaggtgaaggagttgacccagggaggtgtgtgcaatgtcctaagtactgggagtgtttgtgttcttaacccaagtggttggtacatgcatatttgctttattatgtttgacacacttttgtaaatagatagtataaataaatgaaaacaaacaaaaagttataaggtgaactaagaccgaggctaccaactgtattcatgcatttggtaaggctgtggttctttctcagtcagggcccattttgctccctggaacttgtggccaggtctagagacatcttggttgtcacaactcagggtgaatagtgaatagaggccaggtatttggctaaacctcctacaatgtgtagggtagcccctgcaacaaacaatcttctaaccccaaatatgaatagcttcttgtcctgttataaagaagctattctagtaaaaacgtctgtctatgatgaagcatgcacaaaaatagtcattagaaagaggtaaaagacaaaatgattttctcatattttcttcctgaacctcaatcagcccactttaggaaaattgcacccagctgctggtaggtaggcaggaccgagtgtgaagtctgctgctttctctgtttttatgcaagtacttcactattttgattactttagttttatagtaattatggaaattaggtaatgctagtcctctgactttgttcttctttttcaaagtcattttgactaagaatatttagatcatttctatttaatgtgactggtaatataattagatttgagaatatcatcttgctatttgttttctatttgtcccgtctgttcttcgttccccctttcgtctttttctgccttctcttggattattttttatgattccatcatgtctcctttgttgtcttattaagtataactcttggtgtttttagtatatatctttaacttaataagtcaaccttcaagtgatagtctgtcacttcatgtatagtgcgagaaccttagaatagtgtatttccatctctctgctctgagccttcatactatttctatcatgcatcttttacatacatcataaaccccacaatacattgttattattgatgttcaaacattcaattatcttttaaataaagatagcaaaggaatacaaaaaagtgtagtagttaccccttctagtatagactcctttgtatagatccagatttccattcagtatcattttccttctacctaaagaacttctttaacatttcctgtagtgcaggtctgctggtaatgaattagttaagcttttgaatggctaaaaaagtctttgttttgccttcatttttaaaagttatttttgctgggtatagaattctagattgatggtgtttttcagtactttaaaaatactgcttcactgtcttctcgcttgttattgcttctgataagattgacagcagatttctcatttgtgtccctctgctcacactgtatcattctctggctgctcctaacattttctctttattactggttttgagcaatttgaccctcttatggcttgatgatgtttatgtttgctgtgcttaatgtctgttgagtttctgggatctttgggtttatggttttcattaagtttgagggaattgtatgtattatttcttcaaatatttttttctgtctctcttccattctcttttggggattccagtaacctgtgtattagacttattgaagttggccgtctttaatggagtgtattggttcattctcacactgctataaagaactgcctgaaactaggtaatttataaagaaaagaggtttaattgactcacagtccacatggctggggaggcctcaggaaacttacaatcatggaggaaggcatctcttcacaaggtggcaggagagagaatgactgaaggaggaacttgccaaacacttataaaaccatcagacctcatgaaaactcactatcatgagaacagcatgggggaaacctcccccacaatccaattacctccacctggtctctcccttgacacgtagggattatggggattacaattcgagatgagatttgggtagggacacagaaccaaaccatatcatgagcatgatttgcaggccatgaagaattctccatttttgtttcctccaggtggctgagaacaacctgtgcagccagtatgaggagaaggtgcgcccctgcatcgacctcattgactccctgcgggctctaggtgtggagcaggacctggccctgccagccatcgccgtcatcggggaccagagctcgggcaagagctccgtgttggaggcactgtcaggagttgcccttcccagaggcagcggtaagaacttacattctgtgttagtctgctcaggctgccataacaaaataccacagacagggtggcttatacaacaaaagtttattttctcacagttctggagactggaagtccaaaatcagggtttagcttctcctgaggcctttctccatggcttgcagatggccacctcctcaccgctcccccatgcggccttccttccacacacaagcatctctgctgtctcttccccttcttcataagggcaccagtcatattggattggggcctaccctaatgacctcatttaaccttaattgcctctttaaaggccttatcttcaaatacagtcccattaggggttagggcttcaacataggaatttggagggaacaccatttcataacgctatctcattgcacatttttttcacataagtcatatgtaatctacagtttgaggagaatctgaataaacacatttgggtcccccagttcagaactatatcagtgaggtctcaaagagttcaggcctgggacgggtcttgcaatacagatcaggtgtggtaggaagaatatggaaggagtttacagtaggaggactgttgtaaggtggcctggtagcagcaggatgctttcctaatgggggtagagtgtgtatgctggggggataatggaagatgttcggatgagtttcgggggattcccaatgtggtctgccacctgagctgatggcagaacactgggatgaggcaggaagccaaaagtggtggctttcaagcgttagtaagcaaaaactcacctgggttacatactcagaatgcatgttcttgaggtcacccagacacagtgcgatgtccccgcatatcagagggtaagaccagaaagtttccagttttaaatgtctccccatatgattgtataaaagtttgagaaccatgggcctaaggcgctatgtaggtcttttaagagcaaagtggagcactgatgtgggcgtggcctcctagggatcgtgaccagatgcccgctggtgctgaaactgaagaaacttgtgaacgaagataagtggagaggcaaggtcagttaccaggactacgagattgagatttcggatgcttcagaggtagaaaaggaaattaataaaggtgagtaccccctgtttggatgcctggtcaagccttctgacatgcatggggtctgtttgtaactgttcatactcccacctccctgggcctgtgctgtcaggacacctttctcctgcacatcaggccacggttccttctacttcttttacctcattatgaccagcacgcttggatatcagcatctgatagcaatcatttatttctggccaggcacagtggcttgtgcctgtaatcccagctctttgggaggctgacacggggggattgcttgagcctaggagttcaagaccagccagggcaacatagtgagaccccgtctcttaaaaaaaaaaaattaaaatagctgggcagggtggcatgcacctgtggtcccagctattcaggaggctgaggtgggagagttgcttgagcctgggaagtcaaggctgcagtgagccgtgatcttgctacggcactctagcctgacaacagagtgagaccctgtctcaaaaacacatgtattgcttattatgtaagtatctagaataatgtgaattttaaaatgtccccacatatggatgatctgtcccttattcaagggcttccctacttagatctggcaggaagaggagccagatatgggggtgagggagctcctccccctgttcctttgtacaaggaactccacattgtggacaggatcgtcactgaaccccactcagaaccagcacccttttctaagaaagaggagtgactgtgtttgcataatcccagcttaggctaattcatggcaggcctccataaatgcaaaccacaaggatcaatttgaagtgtctgcaaggggaaatgacaccagcagtgtagacagggtagagtagctgacaaagaacagcctctgtgagatgcatggataacatcttcctatcgaccttcatgtttttctggcatgtcacatgtttaagtttcattcacactgggaaggtactgaagagacatgaactaatgcccagcagtaggaagggacgggtttagcatttgtaaagatggagcattaatcacatttgttgactgtttaaagaaagataaataatgttattgacaaaccgtgattttgaattagttgggattaggttggctgcttgcagcagaaaactcaaaataactgtgtgccttagcccttgctgtataacaaacccatcttaaaactaatggcttgaccacttttatttctcatgatttgatggaccagctgggcagttcttctctgggctagctgggctggggctgatggtccaggatggcccttggctggagtgaccgggccttctgtctgtgtggtctctcaccctccagaaggctaagctggacttatcaatgtgggtggaggggttcccagcagcaagagagggcaagacccgacatctaacacctttcggtctctcctgacgtggcactgtgtaacatccccttagccagagaaagtcacgtggccaagcccaatttcaagggaccgattttctctctctccatggaagtgacgaaggcaccctgtaaagtagcgtgcatacagggatggaagggaatgtggatgccattgtgccagcaagttgctgagacagcggtctaaacaatgtagaggctttctgtccctctcatataagtctgaaggcgggcagaccagagctgattggggattccaatgtcaggaaccaagatttattcttctcccatttcttcattgggtgtggcctctgtttccaaggcccccccgtgacttagtcagcaagtccgctttgaagccagctggaccatggcaaggggcatatctctgcctttgtaagcacactttctggaagttgcacataacattttcacatggcccattggccagaacccgatctcatgaccacatggcaggtacatggatattgggggaacaattagtggaccataaccactgatatttcctaagttctaaattgatatcaaacatcccaaaaaggcattctagatttagaaaagagtaaagtggtgttagccaacaatttgatgaaacaaattcatatcctaaaattcattaaggaggaaggagcaaaataaaatctcttaatgggatgttaacagccagtgcttatcttagctaaaataagcacatttccccatataattttccagtttatattttaggcatttccatatatttttatttgtttttattttgcttggttgctaatttcctactgacatcaatgagaaggatttaggaatgctaccaggaagaacttcttgcctccgcccagctttggactggtctaagtgggtgtcactcatggtgacgttctcacaaggtctctctacacacagtgctggccaacagcagggaaaatactgagttatcctttgagatctcttttatcccaatcacagaaaattgaatctgctccaaatatgcttttatccatgactcgcagagaggagaagatgctttcagagtattcaccatcatgagatccgtttatcctaagctctgtttgggtttgattttccctgtctcttttctagcccagaatgccatcgccggggaaggaatgggaatcagtcatgagctaatcaccctggagatcagctcccgagatgtcccggatctgactctaatagaccttcctggcataaccagagtggctgtgggcaatcagcctgctgacattgggtataaggtcagacttcagacccattctgaccttggccgtggcgtggggatgggggagtggaggggtgggaggagaaagagggtactgtattagagtaaccgtgagtccagagctgagttttggagttagtatttggaggtgtgagtggggaatttagagagcccgttggtcacagtctgttctgtcaagttgaatggaagcttctttggagaaagtgaggccagtgggcacagttggaaatgtgttctgtgtatttgttttatgttttatgcaatgacttgtttttggttatatacattttgcagcatatctaaagtgctgtgtattaggaaggggtcttatgtgggaagagagcattaaaaataagtataatgggccacacacagtggctcagtcctataatcccagcactttgggaggctgaggcaggaggattccttgagcccaagagtttgacagaaacctgagcaacatagtgagacccccttctctataaaagaaaggttaaaaaattagccaggtatggtggcgtgcacctgtcagctactaggaggattgcttgaaccagggaggctgtgatgagccgtgattgtgccactgcactccagcctgggcaacagagcaagaatctgtctcaaaacaaaaaacaaaacaaaacaagcaagaaagaaataggtataatgatattttagtatcagtgaatctcactttacagattaaagatttaggggtgaagtggggttttttggccaccatttttcattgtgaccatcagatctgaggtcttaggggttaattatctgaaacttcatggttttccctgagcctatagctctgcttctgccacagataatttattttctcataattccagcttggtacctccagggttgtgtttgtgggttcatttctccaaagttacttcttttgggggaaatacccctgggactcttagggcctaaagcaagtgcaaggtcaggacttgtctcacctctcacttgcctttgccatactcacgagtcacctcctctcatttccttacagatcaagacactcatcaagaagtacatccagaggcaggagacaatcagcctggtggtggtccccagtaatgtggacatcgccaccacagaggctctcagcatggcccaggaggtggaccccgagggagacaggaccatcggtgagagtgggggagccccactgtgctcagtgagaatgggggagcccgcctgtgctcggtgagaatgggggagcccacctgtgctcggtgagaatgggggagcccgcctgtgctcggtgagaatgggggagcccgcctgtgctcggtggtctgccagtgggcaagcgtccctccagtctccatgggctttgctcagtggggacctgcctccactaagacctgctaagggagcaggtttggtgcccaccaaggccaagtgaaatgagctgcttttgactctcactggctaggttgccttgtaagccttatctacttgctcagaaaggcacagtgggctcggaagcaggtcaaactcaggaggcacatggtactcattaagaatgcatttgagatgggatgtccataactcaagggataaacaaaacgtggcgtgttctacagtggacccgggtgaaggagcttggggagagccacatgctgttctgggaggcatccctgccttcacgcggcttgtcgtggagttcttttctggagcggggctccactgcccccatggttctgcaggggctatggcctgtcctcaagcaaggatgggaggaaaccctgggaggccgggggcgtgagcagttgttcgttcacctctgcctcgtgactgagcacgttctctccccaaatacatctggctcgcaggaatcttgacgaagcctgatctggtggacaaaggaactgaagacaaggttgtggacgtggtgcggaacctcgtgttccacctgaagaagggttacatgattgtcaagtgccggggccagcaggagatccaggaccagctgagcctgtccgaagccctgcagagagagaagatcttctttgagaaccacccatatttcaggtgcgcttgcctgggtttcatcatggatcagtccaagcccaggatgtcaggccttccaggggacagtggcagccgtcccacagatgtgtggagtgtgtgtgtgtgtgtgtgcgtgtgtgtgtgtgcgcgtgtgtgtgtgactatgcttgttccccaacaaggactatggaattcacctagaagaataggaaggggattacaaaatactgccaagaaaaaaaaaactaaaaaccaatcaaaatagggagagaacaatgtacaataatttacgtagcatggtgctggaaccatattttataaaaacataaatagaagagaataggaaaaaagtagaaagcccagaaatagacctagatatatatatttgacacatgataaatgcagcatttcaaatcaaatagtggactatatcagcttgagtatctattagtggtgttaggataattaatatttgggaaaaaactaaaatactgcccttacttatctcattataccaaaatagttaaagtttaaagttaaatattaagaggaagcaataagcatctcagaagaaaggtaggtgaatagtttataagatttttctatccctcctaccaaaagtgacattttttaaaaggaaaagactgacaaattggtaagatttaaaatgatgagactatgtagagttgtaaacattcttacattcagttctcccagaagcctacagagagccattactcagaattccaggaatatcaaatggaaacttacatcctgttctgcacattcacaattgccagaagatgagatgattcagtgtccattgatggatggatgcagaaagcaatgtggtctgtacaaaaacatggaatactttcagccttagaaaggaaagacattctgacacatgctacaacatggatgaagcttgggaacattctactaagtgaaagaacccagtcgtaagaggacggatactgtctgattccacttagctgaggtccctggagtagtcagattcatagagacagaaagaatgatgggcaccaggggctgggagagagagaatgggcaggtagtgtttaatggggccattgtttcagtttgggaatatgaaaagttctgaagacagacagtggtgatggttgcataatagtgtgaatgtacttaatgccactcaagtgtactcttaaagatggttaaatggtcaattttatatgtagtttaccacaatttagaaaaattgacagagaaactgaagcttaggtatgagtatactcacaaaaaggcacagaaactcatgcttcactgctgcctttatcctaaaatgtcctataaaatgtgggaaaccctgtaataactcactctgtgagcacaaatttggatcgagtgagaagatacttgacttccttcctccaggcagcccatggtttaagtttttatcttggacaagatatcttgtgtctcttctcctcagtgttctgctacccatttatctcaatatgcttcaatgtatttgtatgaagatatgtctgtatccattatgatcacctacacatattacacatagaagggggtatgtgttataaaaacatatctatacatgtctgtgtatttttgtgatgaccaagtctatagtcagacaccatgatacacatttattatatcagctggaagagctcattccatatcattgtggaaatatcctagattgctaaaattcagtcataatcctattcaatccagttctgagtatttgttgggtaccaactgcaagacattccatccagttgtaagcaactgaaatttgccttgactttccccaacagcaaaaaggcagacatgcgtgttctggctacatcaaggtggaaatcggtcctgtgttctcttctagggatctgctggaggaaggaaaggccacggttccctgcctggcagaaaaacttaccagcgagctcatcacacatatctgtgtaagcacgggcagagctgtgggttctctaaaaagaatactacgaccgcagagctgaaccttgctggcttcttaaacatcactgtacacacagatcttctgaggatcttgttaagatgcagtttcagattctgtgggtctggagtggggcctagaattctgcatttccagcaagcccccagacaatgtggatattccttttcaggggaccacagtcagggggaatgctgatagactatatctactgggccaaaataaaaattaaaatcttatgcacaagctactaactcttcctttctcattgacaaccactattataatgtcttagtcattctaatgaacatattttttaacttctaaaagctttgtaaaagctctctgtggttctttttaaaagtctgcctgaatatagtgtcttcctttttcaaattttcttttcttttcttttctttcttttttttttttttttttttttttttgagacagagtctcactctgttgcccaggctggagtgcagtggtgtgatctcagctcactgcaacctctgcctcctgggttcaagcaattctcctacctcagcctcctgagtagctgggattacaggtgcccaccaccatgcctggctaatttttgtatttttagtagagacagggtttcaccatgttgaccagactggcctttttcaaattttcaactcagcaccagagtgcaaggtcttccacgtggtccccaggaatgcgggtgcataacagggttgtttccagccgaccatgatgagtgcagagctctctggggtcccactgtatgcagaaagaggatgcttccttattagattccccacctcgagcaagcccatggggattgattttttgcctctgcaccaagtcaggttcataagttcccgttcgaattttcttacctagacagatgcccttgtggctgagccgggcttcattgctgccttctccttgagcccctgcctggccactgttactggggctggcctctgactacccctcactaacttgtgagtccaccgatacatttaaaggtgcagctttcacatgtcagctggcatttttagatgtttgccgtggaagggtgagccagcatatggcgtcaaccgtattgttaaaaacataagtctctgatcactttttattgattgcaagcaacataaaagttgttgaatctcaaattgctccaaatgccactttttcagaacctactagacaagtggatctctccagtctccctccagagagtttacctaatatgaccacagaggaactgctcccgggtcactctgccggggcctaggacccatgcacagtgggtgccacagtgctgctcatgaggctgctgtcgcaggagtggggaagggggaagacctgggcagaaaacagtgcccccagtgtgtgcccccctgcacctcccccgggtctggaaaagcttccttttagaggaagccaggaagtcaaatggcccacacaactcctctgcagagggaggcccgggacctccttttcattctctgttcatctttacacatttccattattttctctccattttcctcagaaatctctgcccctgttagaaaatcaaatcaaggagactcaccagagaataacagaggagctacaaaagtatggtgtcgacataccggaagacgaaaatgaaaaaatgttcttcctgatagatgtgagtgttgccagctgcatggagctggagaagcacatgtcatggtcaaaaaagggaccctgggccttatgcacttccttcttcactcccccaaggctgatccaaagacatctggcccgtagcactcaaagggtggacagggctgagggaggcagggcagggagtgcagatgtgggggtggagtcagcagcgagggatgctcaggctgcgttgtgcctactctgtcacgagcatcacccagatccctaaggcagtaaggggtgggataggattttctagtgccaaaacctcttctttcccctgatccacagtgtcccataagaaagcaaagaatgactccccaccctccacataggcacggcctccaaatgaccttgacacttggatttgaagtctatccacttatactgatgtttttcttcttgacagaaagttaatgcctttaatcaggacatcactgctctcatgcaaggagaggaaactgtaggggaggaagacattcggctgtttaccagactccgacacgagttccacaaatggagtacaataattgaaaacaattttcaagaaggtgagtgtcttagtcccttcttttgggctgctacaaccgaatacctgagactgggtcatttataaacagtagaaacttattgctcattgttctggaggtgagaaatctattcttaaggaatcaggaaatttggtgtctggtgagagcttgttctctgcttcaaagatggcaccttctagctgtgtcctctcatgggataagggacgaacaagcttcctcggacctcttttttacaggggtaccacaggcatacctcagagatattgtgggttcagttccagacaaaaagaatattgcaataatgcaagtcatataaacttcttggttcctggtgcataaacagttcatttatgccctactgcagtctattaagtatgtaatagcattaggcctaaaaaatatgtatgtaccttagtttaaaacaccttattgctaaaaaattgctggtacagaaacaaaaagtgagcatgtgctactggaaaaaaatggtgctgatttgcttgacatgggattgccacagactttcaatttgtaaaaaatacggtatcagtgaagtgcaataaaacaagatatgcctggaatgccattatgcgggcagagtgctcataacccaatccttcctaaaggtctcctctgttgataccatcacactggggattaagtttcaacataggaatttttaggggacaccaacatgtagaccatagcaatgagtcaataccgtggtaaacctgatacgttggcttaagacagagaagagtggggcagttggggaggatggtcaggataaggagctagtgacaactaaagccatgtttgctctcttctatatcactgaacccaaatgaccatccactgatgaattgataaaccaactggcttgtgtctgtgtgtagcggttggctttggctgtcataacaaagtaccacagacttgggggggcttaaacagtagaaatttattttcttacagttctggaggctggaagtccaagatcaagatgttggtggagctggttccttctaaggcctctctccttgccttgcagatggcctcttctcattgggtcctcatgtggttgtccctcagtgtgtgtgtcctcatctcctcccacaaggacactaggcagatgggatgagggcccaccctagtgacctgatttcaatttaattacctctttgcctgtctccaaacacagtcagattctgagtttctgagggttaggacttcaacattggagtttgaagaggtcacaactcaagctcagcccgtaacaccaagtcctggaatatttccagccacagacaggcacagagtgctggtccacagcaccccatggatgaaccttgaaaatgtcatgctgagtgaaagaagccagccacaaaggccacacggtctatgattccattgatagaaaatggctagaacaggcaaacccaggcaggcagaaagcagaatagtggctgccaggggctggggagggaaaagtgggaagttatcactgatgggtgatggatgtggggtttgggagttatgtctggggatggtcgcacaactttgtgaatatactaaaattcactcacccatacacttttttttttctttttctttggagacagggtctcactctgttgcccaggctggggtgcagtggctcagtctcggctcactgcaccctctgcctcccagattcaagcgattctcctgcttcagcctccacctccctagtagctgggattataggcacctgtctaatttttgtatttttagtagagatggggtttcaccatgttggccaggctggtctcgacctcctgacctcaggtgatcactggcctcagcctcccagagtgttgggattacgggcgtgagccactgtgcctggcctgaaccatatatttttaacagagtgaatgttatactatgtaaatgacatctcaattagaaaaatccttatgggaaaatatttcctgactaaaaaaagtgttctagattaccactcaaaaaggaactcaaaccctctgaacttctgatggggctaactctctctagtgtggattgttgggagtacaaatcattccaaaagtttaaagaaaaatgcagcatcttacacagtgaacagtgctactgtatcacattcatacaagttgatgtgcctggtttactctgttatcccatttgacttgtaaacactttctacacatggcaatactttcgacacatgaatatgtgatgtattgttaattccagaaagtgttcatgctcatttctaatgggcatgcagttgagggcaaggagtgtattatggtacaatttctttggtaaaactaaaattggattcacaaaacttcatactcgagtacgtttttaagaaggggtcttggccgggcacggtggctcacgcctgtaatcccagcactttgggaggccgaggcaggtggatcatgaggtcaggaaattgagaccatcctggctaacacggtgaaaccccgtctctactaaaaatacaaaaaaattagccgggcgtggtggcgggtacctgtagtcccagctacttgggaggctgaggcagaagaatggcgtgaacccgggaggcagagcttgcagtgagctgagatcacgccactgcactccagcctgggtgacagagcgagactctgtcacaaacaaacaaatgaaaaaaaagggtcttactcgaagtttctgcgtatgtgggttcctggcatcgtacctggctctgcactccccttcctgagatgactaaggaaaattatcttcagatctggttttgtgtgtgtgtgtgtgtgtgtgtgtgtgtgtgtgtgtgtgtgtgtgtgtaatccctggatatttttagtttaccagttagatttgatttgataccactttttcttgccatttatattttcagaaaatttagaatggtattgtgtttagaaaaatgtgcaagattatttttgtaaaataatttagagggttttttttcctgctataggccataaaattttgagtagaaaaatccagaaatttgaaaatcagtatcgtggtagagagctgccaggctttgtgaattacaggacatttgagacaatcgtgaaacagcaaatcaaggcactggaagagccggctgtggatatgctacacaccgtgacgggtgagtgctcagtttcacctctgagcattgatttctaaagaaaggaaaggttcgaaccaaagccagcaccaaacttcagcactttcctcctggggtgcatcccacaccaacgagcaaacctctcattctccagatgccaagttggtattcaacaattcaattcaattctgacactaactaccctcagtcagtgtggaccccatagcttaagggctcagttccacaacactggccccaactacaaatgccggtcacaagtcccagacctcctattcttctgatggactgtttataaatcaaggttcttgcgacccattcctcaggtcaaccaagaactctggaacacacttcactgacatttactggtctattagaaaggatttgataaggggcacaaatgaagctgttggagaggcacatagtaggggcctgaacacagaagcttctgtccccacggggttgggggcaccatcctcatggcacagagatgtggtcatcaaccagggagctcttggaacctcaccgcggagaaggttttatggaggcctcatcatgaaggcatgatggaggattgactcaatctccaggccctccctcctctgtggagctggaagttctaagtttctagccaaggcttggtctttctagtgcccggccccaatcctgaagctatgtaggggcccaccaggcatcatctcttcaaaacacgagatactcctaaggctggacattccaagagatgtaggggctctatgttaggaaatggggacaaagacaaaatatttatatttttcctatcacaccacacctcccccctgctccactgctatgctggcttcacactcaaaatcggctgtttatttgaaatctccgaggagtaaagccaatggttccataactgcacgtgtagatgtgtttggaaccttttggagtgctgtaggaatctaggtgtgtcacggataggtaggaaactagatcctactgtggatccactcccttcttgaaatgctttgctttcttggttttccaggtattaaatctctattcttcatcctctccttgactgacagtatccttactcacacttcagctgcctcatcttagcagtaattaataatcactcatggatccatgaactaaggagctggagatagcctcagaacagctcattcagaggtgtatttccagtaaaattgaccttttagccctgataatcatataccaaaacctgcaatcatgttgttttggtccattgtagactcttaactcattccagaggaaagtttataatacttagagccttatagtcataaaaatcaacatagatatacctatttctttttcagaaatgtatgacatggagatcaataagaggttttcaatcataaagatactataccttgtattacaataaaattctgtgaggaagtagaatagaaatgagtttcaaaaataaaagataaataatataaattttttaatctaagagcttgttcttgtatttttttcaaatggataatgtagacactcaaattccattgatatatttaagagtgatttgacttatattaagagttgtattataaaatattaatatttataatttaaaagaaattacattctttgcagctatttaggataaaaagtttaaatatcaaataaatgtatgccaggggtcatttgcttttaagattcttccagcaaattattaagcaaaaagagcatgccttgctttttcatggtaaagagaagaagggagcggggagaggggaaactttacttcataccatttgatcctcatatttttttgcatcttaagaagagaacaaatgatcctaccaatattgaactatttttctctctttgattagatatggtccggcttgctttcacagatgtttcgataaaaaattttgaagagttttttaacctccacagaaccgccaaggtaaaaccaaccatgtgttgtttaaaaaaaaaaaagaaaagaaattaagcttgacactagaaaatagatttcttggatgaggattatttcaactttattgtatacttttagaacagcaaataacatcactcactagtgcttcttctgatgttaccggtgatgtctggttaaaagcaataaaggagggagtgcttaaacgcacagaacaagagatccacagttagcggagaagattatcacatctaagggcaatggctccaaatccagaaactcactgaggaaactacatataaaaatagaatatttctggcccgagtgggcatgatgagcctgtaatcccagcactttgggaggctgaggccggtagatgacttaaagccaggagtttgagaccagcctggcccacatggcaaaaccccatctctactaaaaatacaaaaaagtagctggacgtggtggtgcatgcctgtaatcccagctacttgggaggctgacactttagaattgattgagcccaggaggtggaagttgcagtgagccaacattgcatcactgcactctagcctaggcgatggagcgagaccccgtctcaaaaaaaaaaaaaaaaacaaacaaaaaaactttccatccagagtgaggaaagagcctacaggaaatgagcctgggggacagactgggccaagagaccagacttagccactcttagaaataggtgtccccggcacagatgaggagcctggccccatgattcaccagctggaggccttgggatgtgccacttccagcctgtgcccctgactcctcattcataaaagaagactgataaggccttcctcagaaggttgagatggacgtggagtaagatgtttaggatgcacctgccactgtgcactgtgcctctcctcaaggcctggagggtccaggggtgaagtttctcctcctcaggttttggcaaccagtttctctaaaccccgggaacataaaacataattttctgacttaaacatggctttcctgctcatccctgtggattatctgatggatatgacaatcctcgccatcagatatagaagcccctaaaagagaaaggaaagaagctgagttacggggcctgaaagcaagcctgtgcaggtccccaggccccgggatgggggtccggcccatctgtggctcaagcctcctgggaagctctgaccctcagccagggctagaaacctgccttagatacaccagggcgcggcccagagggctgttccaggaaacgtgctgtttcactcacgttgggtaacctggtatttacggacttcttacctactttcctgtgactcaggaatttgtgtcttgagggaaactgtatttatttattttttactgtagtccaaaattgaagacattagagcagaacaagagagagaaggtgagaagctgatccgcctccacttccagatggaacagattgtctactgccaggaccaggtatacaggggtgcattgcagaaggtcagagagaaggagctggaagaagaaaagaagaagaaatcctgggattttggggctttccagtccagctcggcaacagactcttccatggaggagatctttcagcacctgatggcctatcaccaggtacgtcttcgcgtggttcaggatgccagcttccattctttccttttcttctgaacgcctctctctttagtcttgctctctctgtaggtgacgttggtcagctctgtcgtttacctccttgttagcctcctgtattagtccattttcatgctgctgataaagacatacctgagactgggcaatttacaaaagaaagaggtttaacggacttacagttccacatggctggggaggccttctaccatcacggcagaaggcaatgggcacttcttacctggcggcggtggcaagagagagaatgagagccaagtgaaaggggtttccccttatcaaaccatcagatctcatgagagttactcactaccatgagaacagtattggagaaactgcccccatgattcagttatctccccctgagtccctcccacaacaggtgggaattatgggagtacaattcaagatgagatttgggtggggacacagagccaaaccatatcgccttcgtagaagcagctcaacctcagacagagagatggtggcttagagccagtgacatctggttttgatggctgtctagctctggccaagttacttaacctctctgagcctcagctttctttgtaaaatggtgtctcctcatagattctagtgcatattccaggagacgagtgtggatgatgataatggattgctaatggaaaaaccaaactctgttaaaatatttgaaagaggtttattctgagccaaatatgagggaccatggctctgggaacagtctcaggaggtcctgaggaagtgtgcctgaggctgtcaggatgcagtttgattttatacatttcagagaggcaggaattgtaggtaaaatcataaatcaatacatgggaggtgtacttgccctccctaaagaggcaggacaccttgaaggagggggagcttaccggtcataggtgggttcagagattttctggttgacgattgcttgaaagagttaaactttgtctacaaacttgacatcaatagaaagaaatgcctgagttaaggcagtgttagaggccaaaggtatgtagatgaagactctgggtagcagccttcagagagaataaatggtaaatgtttcttttcaggccttagaggcagcaggctctcagttaatctctcctagattcagggaaggcctagaaggggagaggtctgactgcattaatggagattctctacaggtgcaaattccccccccacaaaacatggcagggccatttcaatctgttggtcctgttacagccgtttcaaaatatgtccacaaaatatatttttaggtaaaatatttgtatttcctttagggtctgcaatctgtcttgtgatgctataccagagtcgggttggaaagtaagccattttatactgagttcatggaaactcatccaaggagatttcatggtttgtggggtgtgtgtgacttaacccctgcctcacatgactttataatatggtatcttactactccagagtctttttggccaaccttatgatctcaatttcaacctaaactccaaaagggcctggcttctcttcctgttacggccaggaattcagattttcaggtttctctggggtccacttggccaagagggggtctgttgagttggctggaaggcataggattttatttctggtttacaacaatttccttagtgcagcattggaatgcaatggtagcagactaaatggaagctatcgcgtagacacatgctttggttgatactgcacgattcagttaacctgaagtacaatctaattcatcctagggaaggaggcagtgaacacagacacaactcaggtagagcccttgggatgtgtaaacacctgaggaggtaaagcaaattgtaatctctcggtttatcagatgtccccattgccttactatttggatgctttaaagcagggcctctcaaactccacccagcacagaggcctcctgggatcttgtggaaatgcagatgctgattgcaggtcaggatgaagctgagattctgcctttcttttttttttttttttgaaaccgagtctcactccattacccaggctggagtgcagtggcacaatctcagctcactgcaacctctacatcctgggttcaagcaattcacctgcctcagcctcccaagtagctgggattacaggcttaccttgccaccatgcctagctattttttctatttttagtagagatggacttttaccatgttggccaggctggtcttgaactcctgacctcaagtgatctgcctgcctcggcctcccaaagtgctgggattacaggcgtgagccaccatgcctggcctctgcatttctaacgggctctcaggggtcaccatactactggatagaggccacacttggaggagcaaggctctaaaccgagggtcaacatccattcctccagacactgggagctgcatgcacgtgagtgaagccagttaaggggaagacaggcatgcacatcagcttctcctgcagccaagctcacacctgtccgctgcttccactgcctcctagaatgaacagttaccttgagagtaggtgaggcatatacatgcacagaatccaaacaataggatgagtgacaatggcagaggagtctccgagccaagcagctccctggacagaagcagcccttctccgggttcatttctgtcctccgaggctgactcatgcactcaaaagctcccatgcatatacattttataatggtttttacacaaaggttagcagaggagtggacgtgctgctctgtaccctgcctcttttgctgtacctgggagattgttctgcctcagttctgatggggctgccttgttcttttcaatggctgctgagtatcccattttatggatgtggtatattgagccagctccctttaagcgaacagtttgtttgcagtcttttgctaatgcaggtgtgttgctgtgaataggtttgtttgtatatcatgtatctggaagcatcaattcctagaaatgagattcctggtatattaggattgtgcagggaaacagaaccacagatatatgtatgtaaagaagtatatttcagccaggcatggtggctcatgcctgtaatcccggcactctggaaggctgaggtgggtggatctcttgaggccaggagtttgagaccagcctggccaacatggcgaaacccggtctctactaaaaatacaaaaaaattagctgtgcatggtggcccatgcctatagtcccagctacttgggaagctgagatatgagaattgctcgaacctgggaggcagaggttgcagtgagccaagatcacaccactgcactccagcctgggtgacagagcgagactccatctcaaaacaaacaaacaaacaaaaaacaaaacaaaacaaaaaacagaaggaaagaaagaaatatatgtatatttcaaggaattggcttctgccattttgggagctggcaagtccaaaatcccagggcaggccagcaggaagagcaggccagaaattgcagcaggagctaaggctgagtccacaggcggaatttcttctttttagggaaacctcatttttcttcttaagaccctcaactgattggatgaggcccatccacatcattgagaatggtctccttcacttaaagtcagtgggttacacatgttacccacatctacagaatacctccgcagcaatacctagattcgtgtttgatggaatcactggggactcgagcctagccaagctaacacatgaaacacaccatcacagctggggaaaggatggcttattttagactgataaagatgacccagagaaggcctgctccatccacactggccgctttagtctgcactaaagttgttggttttttttgtttgtttggtttttttttggtgacagagtctcactctgtcgcccaggctggagtgcagtggcgcagtctcagctcactgcaacctctgcatcctgagatcaagcgattctcctgcctcagcctcctgagtagctgggactacaggcacgtgccaccacactcggctaatttttgttttttcagtagagacggggtttcaccatattggccaggctggtcttgaacgcctgaccatgtgatccatccgcctcagtctaccaaagtgctgggtttacaggcgtgagccaccacgcccggccttgttggggttttttgacagcctaataggtgaaaatgacatctcattacaatcttaattggcattctcttatgacaacaagctggtacatctttttgtgtgttgagggttatttctatttcttgctcagcaaacagttcatccaggaagagcttcttggtgagatagtagacctctgcgatttctgttgcagacgatctacattttgtcatttgctttgtcatttttgtctatggtggttttagactatgcgtaagttttctagagcagaaactcaagttggatttgggcctcagtggttattgccatactttaaaaggactttgtctccctgagatgataaatgaggtggacaatattttctttaagtaatttcttattttaactgttacatgatacctttggcccatttggagttctttgatgtcaagaatgaggcaggatccagatggcagcagaggtcccagtcccatcctggaagggtcgtctagttcccactggtactccacacgcccactcaggcactcacttcccctctgcgttgggtcttgtctgcaagactctcttatgttttaccatctagtgcagccagcacccccacatcaccctcactttttctttctttaaattgtgcagaaatattcatcatgtctattttgccatcttaaccatttgggggtacatagttcagtggcattaagtacattcatattgtgccagcatcaccagcagccatctccaggaccctatcaccttcccacactgaaactctgtccccattaaacacattccccattccccgcccctgaatccctgacagctaccatcctactgtctgtctctgtgaattcaactaacctaagtacctcataggagttgtgactggcttgtttcatgcagtatgatgtcctcatccaggtggtagcaagtgtcagagtttcacgcctatttatttattattatgagacagagtcttgctctgtcgcccagcctggagtacaatggcgcgatcccagctcactgcagcctccccctgcctgggttcaaacaattctcctgcctcagcctcccatggtgtgccgccacacctggctattttttgtatttttagtagagacgcggtttcaccacgttgaccaggctggtctggaaatgcagtttttgcactgtctgcctgcttacctttatagagcatattttgccctcttccatcagaattacccatttaatggtcaggaaaagctgctgggaatatgactcatagctgggacattctctgcactgtgcatagttcctctctgccaccaccatggaggagattgatgggtttgaaacccaggggaaggtcattgccctgcgagggtctccctcattgagaatctggatcccctcatgtgcacatggtgaggtcagagtcccctcctcacagtgtcccctccaccctcccgtgaactgttctttccttccaggaggccagcaagcgcatctccagccacatccctttgatcatccagttcttcatgctccagacgtacggccagcagcttcagaaggccatgctgcagctcctgcaggacaaggacacctacagctggctcctgaaggagcggagcgacaccagcgacaagcggaagttcctgaaggagcggcttgcacggctgacgcaggctcggcgccggcttgcccagttccccggttaaccacactctgtccagccccgtagacgtgcacgcacactgtctgcccccgttcccgggtagccactggactgacgacttgagtgctcagtagtcagactggatagtccgtctctgcttatccgttagccgtggtgatttagcaggaagctgtgagagcagtttggtttctagcatgaagacagagccccaccctcagatgcacatgagctggcgggattgaaggatgctgtcttcgtactgggaaagggattttcagccctcagaatcgctccaccttgcagctctccccttctctgtattcctagaaactgacacatgctgaacatcacagcttatttcctcatttttataatgtcccttcacaaacccagtgttttaggagcatgagtgccgtgtgtgtgcgtcctgtcggagccctgtctcctctctctgtaataaactcatttctagcagacactgctctgccatgttttgtattttggcgagaagcctgaaactagcaggtagggtgcagtggagcagtggacgtaaagctgccctctgtggcggggccaggtaggagcaagcaaaagaacagggtctgatgatttcctagagactggagggaaatgggggaacacactttaaaaaatgaaacaatatgaagccaacggtgctaacttaataatgtgcattgatcaaatgtccaatttgttgagtcactgggcacctggcatggagttgaaaagcacaaggcccagtcaggaagcggttgccaggccaggtgcgatggctcacgctgtaatcccttcactttgggaggccgaggcgggtggatcacctgaggtcaggagttcgggaccagcctgaccaatatggtgaaaccctgtctctactaaaaatacaaaaattagctgggtgtggtggcgtgtgcctatagtcccagctactcaggaggctgagacatgagaattgcttaaacccgggaggtggaggttgcagtgagcccagatcgtgccactgcactccagcctgggctacagagcaagactccatctcagggaaaaaaaaaggtttcccagtgggactttacctgcagaggctgtggctgggggagcggtctgggaagcagagaaggcggaacactaaccttggaggagaacctgactgaagttctctggtctagcctggttgggggagactcgagccacactcctacgccctgactctgagaaccatggctcccaatcagtgctgctgctgggcctcctcaccatgaggccagggcaggctcaagggcaggaaatcgaacagtggactagatggatggggcaggagaggaccggacactctgtcccttaaggggagagttgaaggatcaggattgccccagcctaggaaagagaaggccaaaaggcaacaagagagatgaagtgtgagcaccaaggtgtgacatcctctggggaggtatattctagatgatcagtgtggggaatgggggtactttctacagaggggcccccggatggcatggcttcctcaagagctgtgaggtcccaggcagtgggggcatcaggccaagctgcacagctgcttgtcaggttgggggtgggggctggaccagcaacaccatcctctcccctctggaccacgcccccccatcccagatctcttctgactcttgggactgtgtaattttcaattcttcgggaagtttgagaatacatttataagagaggatgtccggagagcagtggacatttcacaagcccaggtcagcagctgccgctgggcagcaactttatggttcccccaggtgctgaagtgcacctgcaggttgacttgatctactgttaacagagggtgatcagtttgactcatgcttaagggagagacgacaccaacacacacacagaggtttgcaagagtaaggcagggtggatccaaacattcttaattcaatactaggcacgcgttctcgcagtggacatggcccaggtcctctggctgtgttggtgcatcagacagctcggcccttccatgaggcaggtgccctctcgtggcaggcctgggaaacttctccactacaagacgtcccttccttccaccaccacccaaatcagtcttccacttgccttaagtttctgctgcacgggaaacagagtcagaggtgtcaaagtgttgcacaggattctattttgctgttgttagaattttgctagtgataaccagagaggatggaggaagaaagttgacagtatgtgtcccagagaacagcaatttcaatttccccagcagagtgaacctgctggggatgccccaaggtgcccgcaaggatgttcctttcagccaaaatgaacatgtgtggtgatcccccaggcctgtcctaactagtcatccagagccgagaggggagtggccccagcggccagaactgggagagagccctggagaccactttgtgtgactccttcctgcacttagaggggccctgagttcaggcaagcaatggaactgcccctccctacccacccctccattcccagccatgacgggcagcgctggcatcacaccctgctctccggcttccgtggcctgccctgtaagtgaggcaggaaaatcgagtctggaggcaggaatgtaaggctgattcacacttcaactctaacagggactatcccctccacagggagtatgccgagtaaatgactttgtaactttactttatcctcttcatttacatagggcccccaaagtaaccaatggaaacctctagagggtatttaaaccccccaaaaactgtaatggggccattgagcccctaggctcgggccgctcccaccctgtggtgtgtactttcattttcaatacatctttgcttttgttgcttcattcttttcttgctttgtttgtgtgttctgcctaattctttgttcaagacaccaagaacctggacactcaccaccagtaacataagcactggctcaatggtccattgacctgtgcagaacagacaggattataatgatgtctgctcagggaccttcactccaggcacatctggggctcaggggaccccataggatggggctgagttaggagcagagcaatgacagggccaggagtgtattgaacaaaccaaagtagaaagccccagttttctggaacccagggtctgtcatgctgcaggtgcttaataaatgctgtggtgccatccatgtgagatgtgacttgctcctccttgccttccaccgtgattgtgaggcctccccagccatgtgagactgcaagtccaataaacctctttcttttgtaaattgcccagtcttgggtatgtctttatcagcagcgcagaaatggactaatacagtaaattggtaccagtagagtggggcactgctgtaaagatacctgaaaatgtggaagcaactttggaactgggtaacaggcagaggctggaacagtctggagggctcagaagaaaacaggaaaacgtgggcaagtttagaactccctagagacttgttgaatgtcttttttttttttttaattagatagagtctctttctgttgcttaggctggagtgcactggcacaatctcagctcactggaacctccacttccctggttcaagcaattctcctgcctcagcctcctgagtagcttacagtagatcatgggcacctaccatcatgcctggctactttttgtatttttgtagagatggggtttcaccatgttggccaggctggtcttgaacttttgacatcaggtgatctgcctgccttggcctcccaaaatgctgggagtacaggggtgagccaccacgcccagccttttgaatggctttgacaaaaatgctgataatgatatggacaatgaaattcaggctgaggtgctctcagataagagatgaggaacttgttggtaaccggagcaaaggttactcttgttatgttttagcaaagagactggtggcattttgctcctgccttagagatttgtggaactttgaacttgagagagatgatttagggtatttggtgtaagaaatttctaagcagcaaatcattcaagtagagacttgggtgctgttaaaggcattcagtttcaaaagggaaacagcataaaagtttggaaaagttgcagcctgacaatgcaatagaaaagaaaatcccattttctgagtagaaattcaagtcagctgcagaaatttgcataagtaatgaggagctgaatgttaatccccaagacaatggagaaagtgtctccagggcatgtcagaggttttcacagaagcccctcccataacaggcccagaggcctaggaagaaaaagtggtttcatgggccaggcccagggtccttgtgctgtatgcagcctagagacttgatgccctgcatcctagccactccagccatggctgaaaggggccaaaatagagcttgggctgtggcttcagaggttgcaagccttaagccttggcagcttccatgtgatgttgagcctgccagtgcacagaagtcaaggattgagatttgggaacttctgcctagatttcagaagatgtatggaaacgcatagatgcccaggcagaagtttgctgcagggtggggcccttatggagaacctctgctagggcagtgcagaagggaaatgtggggttggagcccctacacagtccctactggggcactgcctagtggagctgtgagaagagggccaccattctccagaccccagaatggtagatccaccaacagcttgcaccatgtgcctggaaaagctgcagaccctcaacaccagcccatgatgcagccaggaaggaagctataccttgcgaagtcacagaggtggagctgccccagaccatgggaacccacctcttgcatcagtgtgacctggatatgacagatggagtcaaaggaggtcattttggtgctttaagatttgactgccctgctggattttggacttttaaggggcctgcagcccctttattttggccaatttctcccatttggaatggctgtattcacccaatgcctgtacccccgttgtatctaggaagtaattaacttgctcttgatttcacaggctcataggtggaagcaacttgccttgtgttggatgagactttggactgtagacttttgacttaatgctgaaatgagttaagattttgggggactgttgggaagacctgattggttttgaaatgtaaagatacgagatttggggggtgcaggggcagaatgatatggtttggctctgtgtccccacccaaatctcatcttgtagctcccataattcccatgtgttgtgggagggacctgataggagataattgaatcatgggggtgggtctttcctgtgctgtttttgtgatagtgaatgggtctcacaagatctgatggtttaaaaaatgggagtttctgtgcacaaactctctccctgcctgctgccatccatgtaagatgtgatttgctcttccttgctttctgccatgattgtgaggcctccccagccatgtggaattgtaaatccaataaacttctttcttttgtaaattgcagtcttgggtatgtctttattaggagcatggaaacagactaatagaataataagaaggagtcatttgagggacctctccaacaggacaggctgcaggaactgagggcaccaaccacaggagcaccaagtctggccttgcctcacctttggtcctctgaccagcagcctcaacatcacccccttataaggaaatggaggctggtcctactcaccaggcagaacttcaaagatgcagtagttactttgaaaaaaaaattgcataatttatttgcatgatattcattttcacaattgaactttacagtttaaaaaagatacaaaaaaagacaaacagttgttcacataaataagaaggggcaataaagaaggaagacgttttcaccattacaacaccttttaggatgtgtcttggggagcaagcaccttacagtgccaactgtttccaaggtccctgggaatgctgctctctacagaggcatgtgcacagacagatcctgcaaatgggattgcatgactttccatttcaaggttaagtcctagctgtagaatcattcatttcattcttgcaaaccagcctgcttggccaggaggcagaaccatggtagagtagtgctcatggttatggcacttggcaatgcaaaagggacccttcccctggttggaaacccacagcattggaagggaccacagagagtccaaaacaaaacacatctttctcttcttcgccgccaccatgggcactttgcttcagcacattcatttatagaacgttaagtcaggagccagtcattttgtcaaagcagctgaaataggccaccactcttacttggcaaagatgatacagtttcaaagagttaaatgaaggtggactacttggagacatcaaaagctaagtttccaggagcactgaggtagcaatgtgtagaaacataacatggaaacagtgtaccttaaactgagcatccttgatttcccccatggacctcaatttccagtgactagcaggcctgaagaggccaacatggtgccagacttggcgccctgccaggaccaaggggcatgtgcactctccagggtgctaggagcagggtcagggaggatgaggaggaaggctgagtctccctcccaggagccccacccaatgtgcaggtggagacctgcaccaggagtgctcagggcaagttccttttcaattgcttccctcgcaccaagggcactgtctatattctcaccccataagaacaaaaatgtttctgttccccttacaagtgactaccacgtcaccacccatgaagggctggtccctttatttctggccaccatccagggctgctaaggctctaagaacccatcagcaaaatccccttgtggagaggtaggctggggacactaccaagtggccccagagggcagccgctgcaggtgccacctggctgtctccctttccatgtctctcctttttcatctcaagtcatccagcagctgagaggtgacagctccatgctcatccaaaattggcccctggaaaggactcagcaggaagatctcaatggggcagcctccacccctctcctccacacttgaccgccagtgcccacaaccagccggccatcaccccttgcggacaaggggttagggagagcaggctgggcaggggagccactgcagcctgcacagaatggcagagagtgccaaagccagacaagttcactgtttaataaaaatgaagtgacctctgaatcatctctaagagtaaatcatgcacggggaagcaaaaccagccccattgttttcttgtaaaacgacgtcaaggacgaagaccatgtggattagccgtctgcctgttcaaataggaaaaaaaaaagtgtgttattttcttaagacaaacaaaggtggaaaataattttttcctctaggttcgcatgaagcacttagaaaccaaataagcaagcttaatagcacaaagggatcattcttctctccaacgtgttggtcagagtcaggctgagcatggcggggcaggagctccggaaggagcgggcagcggatgtggaggccggcacaacaggcatctcttcagcagagtctgggcctcccccggctgctctcctgccacgcagcccttccctccctgcacagccatgcggacccacctgcagccgccaaacacacctggatcatttcctagctccatcctggtgcgagtccgcccctcagcctggctgaccatcccagccctgccagcttccctcctgccctgcctcctcctcctggggtcatctgtttctagcactgggccctgggccaggtgacgccccctgggccccatggtcatgggaaggccctgagtcccgcgtgtcatttgaaggagacacaggtcgggcctcagcgggaaaggccccctggttctgctcctccttcaacagactgggcatctgggagatttgggagaagacagaatagactgctttcttccactagtagcccagccccagaaagcacagaaatctgagaaaactatacgtctgaggtcctggagatgagaagatctggttctcaccccctatctggacaatgcccaaagccagggctctgctaagcagagacatccatgaggctcacatggaacccctgagaccttccctcgtgcttgagtctggggcatcagagaaccctggctgctcctgcccttcctaaccttgggggctgcccaggagccactcgatggccccagaaaaggatgggcacagccggctcttccctctgctctctataaatcaaaagtttcatgtgaggccgggcaccgtggttcacacttgtaatcccagcactgtgggaggctgaggtgggtgaatcacctgaggtcagggcttcgagaccagcctggccaacatggagaaaccccatctctactaaaaatacaaaaagtagctgggcgtggtggcgcatgcctgtagtcccagctacttgggaggctgaggcaggagaatcacttgaacccaggaggcaaaggttgcagtgagtcgagattgtgccactgcactccagcctgggcgacacagtgagactccatctcaaaaaaaaaaaaaaaaagtttgatgtgaggtggcctgggtggaacagctgagtcagctgagccagaacgaagtgtggttggcagagcaccaaggaatttcacacaagctgagccccagcgcttttcatccaaacaccaggggaaatatgcaagtgaagccagtgagaggcaatgggcaatgggtggacactggggggatggggctgtggctggaggaagcagagtttgcttcatgctgaccagtggtcaccagtcagcttccagcagcagaaccacgcctaacagatgtctggctttggctcgaggaatcggagaacacagtcagaaggaggacaggatagttaccctcatttgtcgataaatccagtccgtgaataccatcacattcccgtacactcctggtctgtaagctttggcacagccagaaccccagcttgtatcccctatcagccaccagatattgttcttcgaagtgaccagaggccctccactgtcaccctgtgggacacagcaaggtacagagagcagaaaatcaagtcacaatctgccgcacaccactgaccaggcctagaggagttggggggcgggggtcgcagtgtgagttacgagtgactgtgtgggcttcgaatctccaccatcaaggggtgatggtaacagagatgtaacccccaaagagatagcccccatcctgaattttaatctgttcaagctaaaagttactaaataaattgccgttcataatttaaaatagtctaaatacttgtttctgttccactggcacttttaccaaataccggtttttcagagggtgtgtgtgatttgttgactgtacttccttctgccaccagaagcgttcgcactgtttgtggccgtcacttcccatgactgccccgagctggctccgtgtcactgaggaggctctgctgaccccaagaatgccctctctctcatggggggttcagtaggatctggtaaggaccaaaggtagaataaaaatgttgaattacctggcaagaatcgacgttcccctgcaggaagccggcacagatcatggctggtgtgatcaggttgtcatagacatatctgctgttgcatctctgtgtctcaatgagaagcaccttggcagcgttcagcacttctgaggtcttccctaaggacagggagacttgttgagctcccagtgttgcctgcagctctcgcagggagagcacacttccctccctgagacctccacacgcactacacagatggtcacagccctattttccagccctgccccggtcagctcatcccagcaccaacccctctcctgggaaacctggattctccttacaactggcggtgcctgtgctgaatgcagctctggagttcagcttcagggaaagaaattcccagctctgaaactatagggctctatcagtgccatggaatccccctcttattcacccaacggcttggttctgctgaaccaatttcccactcctcactgaaccccacccaggacacacaggcgcctgtttcccctctggcatgcacacactcttctggagcacacgtgaccctccctaggccgcctgcttctcggctcccctgcacattagagcttctcaagacacggcctgcacttgccacctctgcatttcccactctcgctttgctgcctcccctcgggcatcttctgggcaccgtgggcttagtgtgcaaaaccagaaccctccgtcacaccttctcccaccccaaattctcaccaaccaatatttcctggcttgaaaaatggcaccacccgccaccctggggcttcagccacagagtggaaagccatcgtccctgacttctcactctctctcccacagacatgcaacccatcagtaagtctggtggctctagccctagtgtaccctcatctcttcacatccacgcccgcactctgctatgagctggcttcctgtctcaaggaaccacagcaatggacttgtcaccatcatcctcgtctccatccattcatccccactccccacgcagctgccagatcatggcactccccggctcacgatctccccacctcaagcagatgagaagctggtgtcttcaccataatccacaaggacctatgcaatctggccccagcccacctccttggccccttgaccacacctgaagatacatgcactagcctttttgatgtgtacacatttttgccatttgagtctcagctcaaatgccacctcttccgagaagcctttcctgaccaccccttcaaaatagccgggaccttgtgatccccaccctcagatgtttggaagtacctcgctcagttgtttgtctcccatctgtctgaccacacctgccccgtccccaccaccgacatccagaagagaggtaaagctcctgacagcagagacatttgtcttactctgttcacttctgcattcccagcacctgagtagcacccagcctgtactaggtgcaggtgcgcacaaatatttgtcgatattcccttcatcttggattccatgaggtcttttgcccagcctgtggctctactgtagtaagtttctgctgatgaggagccaggatgccccccactaccttccctgacgctccccagaaatcacccaacctttgtacttttccccttgtttgaaaggatttgttgtctgtatggcctagacgcttttgagaaggatataaacaatatgtaaaatgaacctttgtgcctgccactaagcacttccaaccctccataaaaatgaagcagccaggctcccttcatttgaaagactgtcagagagaaatgcagattgcaaaggaagtgggtggagagagcctctctctgtggttatcagggcagaggacaggcttagatgtggccaccatgggtccaggatgcccgtcctcaccaagccccctgtcactcagccacgcaggccttggtgggatctccagggcagctctaaactcacaatgagtgcaacacaggagatcctgcacctctaaactcgtatggcccagatacttcaaaagccattccacatgctgctctgtgtgatcacgataagaacacagtgtattaggtaggctgggcaggatttctcccacttagcagatggagaaactgaggcacaaggactgggggaatcaaccaaagtcatccagtcattgagtagtagaactgggattaaaacctggacctcccacttccgaacccaatgctccatctgtgggccctgcagtcctgtgtgcccaggagcagcctcacctttctcctcggtggccccccacccggaaatccagcagagctgttctggctgcagcatcatgcctgggttgggcagacacactggtttcactaggtctgtttcaagaagagaaaacacagtgagccaggcgggtatcacctatgtctccacctggccttcccacatgcaggctgctgggcctggcaccctggccaccctgcccagaggaccctgcatcccaacaagtcccacattctcactttctccccctgccagacctctccttctggcaggcaagacgttatgctacttataagtagaattatttgctagctctgcttataagaggaattatttgctagctctgcttccaaaattacatatctccaggtgatcaagacgggaaagacacacaggaggcaacagccaaaaagccgatggagtcaatggagtcagctttcgccccagaggcaccacgccattgctcaggcattcgctcttctatatgtgaaccatttcccaatgtgaatacagacatgctgtagggagggctgaggttttgcttcttctgtatccacatggggctagaacattccagacccttggatggaccagagtgggaccgaataagaggctaagagaaagcatgtttgtcctgaattaagcaacttggttttagaatgtatctttaaaaatcaaggatctttacacattttaggccagtagttctcaactggaagtgactttgcctcaaagcggatgtttggcaatgtcagcaggcaacactggttgtcacagcttggtagctactggcctccagtgggtagaggctggggacgctgttaaacatcctacaaggcacaagagagccctacaacagagaaccacccagatgtcaagggtgctgcagtgggaaagccctgttctagccttttccatgcctggcttgaatcaccaccactcagtacagtacagaacagatgtggtggctgctgcctcccccaaaatgcggcaggtgctcttagcctctgtgagcctctcccattggccacccgctgcacgctaccctcgctcaacgcaaatgcctcccttccatttggcatagcacaagtgtcatttccaatcaacatctctttaagattctgccaacctgcttgccaagcctgagccacacgtaccgttgaaagtcagaggcttctgcagcttcatcagcgcaatgtcattgttcttggtcttggagtcataatttggatgagaaatcactttttctacttggtatccggctccatagaacatgaaagattgtctcaaaatccccgcaaatgccgtccaatgccatggattgttaagaggtctgggagagaagaaggactcagtatctcagagccataaacacagagctctcagtggatgaacttccaacgtcagaagctggaggcaagacacccagaggcaggatggttcaccaaaaaccacacagggagatagtggaagaggtgctcggtctccccttctcccccacactcccccaaccccgactccctgcctcagccccccacatcatccttctttctggctcttgcatcaccttcaaggaatctgcagcacccacaatgggccgacatccctccctggggtttcaaggccatttctagcaggactggcccttattttcctttgtacgccaaagcatttcctggcacatggtaggtgcttaataaatggatactaatgaacagacttgtccgatatcaatcaaaccatttcctttatccaagagtttccctcttaagagaatcccagctcctagtgggcccagagcacccagtggtgtgaagagggggagagaagggagcacccttgggtaacagcccttgagagaaacccagttcctagagggcccagagcacctgggggtgtgaagagggggagagaagggagcacccttgggtaacagcccttgcttccttgaccttcataacagcccgagaggagaagggcatgcccatcttatagttgtacatgccatggatcagagacgttgagtgaatcgtctaagggcacgcagcaagagagggctgggccaacagtcaaacccagttcagcctctctctaaggcagaaaaatacatccgccaagtgaggcctcctccaaagcagcatgtgaccaaaagcactatgtgtttaaggaaaaggggagggggtggtagcgtccataaatgctaatactgtcacggctagcctcacccctacctaaccctctgcatgagcaatgctgtggccaagaacgcttaaccccagggaccttccagcagggcagcctgaagcctgtctgagtgtgccctctcctgggactagcgtcccggagacaggatacctcagggggcaggggctttgctcaagggcaggacagagctcagaggacagtggctggaaggaacgctggtcacggcgacatcgtggagaatgttccacctgcaccctgtgccctgcgtgcaggggacactcagtgcatacagccatgcactgcctggcatgagcgcacttgatgtctcacagccctaggaagcaggtgcaatactctccccatttaaacacaaggatgccggggctgcaagggttgagacctgctcaaggtcacagggtggctgtaggccagccctgagcccccacccggcccgcgccgcccctggcatacttttccacgcagtgggcggctgtcacgatccactcgggggtgatgatggagcctccgcacacgtggacgttctggacgtgcaggctgacctgccagggccaggcccccgggagcgcgctctcgccgcccacaatcctgctctggcggcttgagttcaagttgaccccgcaggctgaggatgacaaacaggaggccagtggggtgagaccagcagaagccgcccagccacccagcgcccgcccctcccaagggtctcccaggctgcaaggacagggcaggggcaccactgctggggatggacttagggggctcctgggggtctcctcttggggaagggaggatgcccctccagcccacccagacccaggaagcaccacttccctgaacactcctgtgatcccatggggtctcccgggacccaggtgggggtgttctggataacaaggccctggggactccttgagtcttggagggactgacaccactcagggaccccagattctcacacaaagaaaaggaagatgggaggggcagggctggaagtgagtgagggggtgaggagacgaggaggtgagtgagaaggtgaaggggtgagtgagggagtgagtgaggagtgaggaggtgagggggtgagtgggtaattgaaaggatgagggagtaattgagggggtgagggggtaattgagggggtgaggggataagtgaggaggtgagggggtgagtgaggaggtgagaggggtgagggggtgagtggggggtgagggggtgagtgtggggtgagggggtgagtggggggtgagggggtgagtggggggtgaggaggtaagtgaggaagtaagggggtgagtgagggggtgagtgaaaaggtgagggggtgattgacgaggtgggggggtgattgacgaagtgagggggtaagtgaggggatgagcaaggaggtgaaagggtgagtgagggggtgagggcatgagtgaggaggtgagggggtgagtgaggaggtgagggggtgagtgaggaggtgagggggtgagtgagggggtgagggggtgagggagtgagtgagggggtgggtgaggaggtgagggggtgagtgaggaggtgagggggtgagtgagggggtgagggggtgagggagtgagtgagggggtgggtgaggaggtgagggggtgagtgaggaggtgagggggtgagtgaggaggtgagggggtgagtgaggaggtgaggggatgagtgagggggtgagggggtgaggggtgagtgagggggcgagggggtgagtgagggggcgagggggtgaggggtgagtgagggggtgagggggtgaggggtgagtgagggggcgagggggtgagtgaggaggtgagcgggtgagtgaggaggtgagggggtgagtgaggagatgagggggtgagtgagggggtgagggggtgagtgagggggtgagggagtgagtgagggggtgggtgaggggtgggtgaggtggtgagtgagggggtgaaggggtgagtgagggggtgagtgagggggtgaaggggtgagtgagggggtgagggggtgggtgaggggtgggtgagggggtgagtgagggggtgagggggtgagtgaggggatgagggagtgagtgagggggtgggtgaggggtgggtgaggtggtgagtgagggggtgaggggtgagtgaggggggtgaggggtaaggaggtgagggggtgggtgaggggtgggtgaggtggtgggtgagggggtgaaggggtgagtgagggggtgagtgaggggatgagggagtaattcagagggtgaaggggtgagtgagggagtgaaggcatgattgagggggtgaaggggtgagtgagggggtgactgaggggtgaaggtgtgagtgaggaggtgagtgagggggtgaaggcatgagtgagggggtgaatgggtgagagagggggtgagtgaggggtgaagggatgagtgagggggtaagtaaggggttgagggggtgagggggtgagtgaggaggtgaaggtgtgagtgagggcgtgagggggtgagggagtgagggattagtgagggggtgaggggttgagtgaggaggtgagcaggtgggtgagtggatgaaggggtgagtgagggggtgcaggggtgagtgagggggtgaggggtgaatgaggggttgagtagggggtgagtgaggaggtgaggtggtgagtgagggggtgaagggtgagtgagggggtgaggaggtgagtgaggaggtgacggggtggggtgagggagggatgagggggagagtgaggaggtgaggaggtgagtgagggttgagggagtgaggaggtgagtgagggttgagggagtgagggggtgagtgagggggcgagggggtgggtggtgaatgagaggttgagggggtgagtagggggtgagtgagggggtgaggggtgagtgaggtctgctgccttccctgcttcctgtgtgtgagtgtcttctccaccaggagatgagtgcatgggcagagggcagggcgggtgccacgcacccttggggctgtgctggacccccactcaggacctaaagaagacctgagccagccctgccgggatgggacggtgtcagctccttccacctcttcaaatgaaaagctgagctcaggaccacggccccacgacagcactgggccatcccagaggagagggacggtggcttccacatttgcaaacagtttggaaactgtaagcactctaaacacagagatggggacacccaagtctaagccaccgtccaaaattcaggagagaagaggcaagagcactgttgttctctggtcttgtccctcctcccgggtcccactggctgatgagcacctggtggccacacggtggtgctggaccacagccccgcagatgctccaagtccacgttaggtggctgccagggctcactaacgccacccccctttgctttctggagaaagagacctgccgggcctccagctcatgggtggcataaagtgtagggctttgtcagcttcttgagcgtgcctgatctcagggggtgtcccttggacccaaggctgaaggtgtctacaggccatggaaatctaaaccaggagctccttggaaagagcgagacgccgctgggcacattccaacccgtgaccccaccttcttccctcccacgcccccagagacacagggagtactgttctgaaagtagagagcttttcctagttagaagtatcaaaagggggactccagatgaacttacctatacagcgtaaagaaaccactgcttttgaagaacaggcatcactgcaaaaagaacaggggaaattctggtcacgatagtgcggagtcacctgcctctcacatgcttagaaatcagtcatttcttccgatgttccctctcctgtcttctgagacatagaagggtctgctagttacaactccaataaggtaagtaaatccatatagggacagtggcaaagaccagacactgagccaaggtacgcggctcacatccccacagtgtgaccttgggcaagttacttaacctctcttaaaattgtaccagctcctaggacggttgtgagggtaagtatacaataatgctagttttgtttttcctcttggaatttaaaatcatcttctaatttttaaggaagccatttggaaacctctgggctcctataactgctttaaatttgtagtgttgaaagcaatataaccaatagtttccctaggattagaagaaacgtaagagttactcatttgggagtcaaacatcccaggttatggatgaagaggaagtaactgatgcattttgtcctgcagtgaatttcccaggctatgctgagaagggaagacgcggcccctggcatgcagagctggcccgccctgatagctgggccgtgtgctctgcggaacctgaattatttcactgagcgtcaatatcggactaggcccctccatgcctgagatggggcaagacacaaggagcctcctccgaaatgatgtctgaacagacagaacaggaaccttgtgctcacaaccacaaaatcacgatctgatgtctcctcctgtcctggctaacttgagcgacggacgtttctttaccaatcacagctttagcctagcctcattccaacctcctcctagaaaaaaaataataaagcagcctcacagaattacccctgcttcctgacagcatccaatccagagcaaatctctgcttcctccaaccacccccaaaccaccttgcaggagcccaggccctacaataataggtccttcctgacaccttcttactaaggcacaccccccgggttctcagtgactacaggtgcattccaggtggactctggctctggggcactgacacggccaagtgaagacatgtcccctttaagagaagacatttcctaagaatcctaaggtcggtagggatagccctgtgtggtcacagcgccagggcacatgtggttattcacagaagcccgacagaaaacaagccaagaactcaggcatcaaagggcaactgctgcacagaaagaggaaaagaagtgcgcctccccccaccaccaccaccgagatagaatagagcctaccagacaatggccttctcttctttcttccaagccctccagcctccttgtgagttcccaaggctcttgccaagggacggcagcacctcctcccctccccccgtccctgcccggctggacttggctccctgattccgtgtgtaacccagaaagacaaagaaccactcagcatttacaaagtgcccaggcagctgtgtttagcttctccacagggacaaaccgcagccctgctgttttgatgggtgcacctggccgtgcacagccctccccactgggcttgccctgccacattccccaggacagcaggctgcagtggaagtcaggcccccagacccctccaccagcggcctccaggaatgcaaacctgccccaggctcccactcagaggaaaggtggcgcggggtgattagttcatcctcccccgaaatgcagcacctggcacctggcaggcagggaggtgatgcctagacaccaggcataagccctggggacctgggaggcaaggagagctcatgggcaaaggacactgtgtatctttcacatcagaaaacacataacagcaacaatcatagcaagtctgcaaacatcctaaatatgtgcaaagcaaaaggaagagcctaagtccatcccctcttctgccctcccagccaggtcagccactcatcatgtgacctgtggcttgtacccacttctaccccctggaaacaccacaactcattcccaggccgccagaatgctgcccatccctcacagagcaccctctggcactgctgtcccggggttggggctaacgggaccagccagcccagctgcctggaatggagcaggacttcccttgctcaagccagtgaagtccctggcaaactggaatgagccggtcaccctggctgggacactgagacattatcttggattcctagaaccacgccctgacaaaataggtacacctctaaatgtctgaagaggaaagaaaactaaatagagttgaatgtcgatgttgcaagtgtgagccgctaccaacaagggcagacggtagaggctgaaaatgaaatagcagagaaacctcagccacttcctatgaataaaccaagggctgcttagagtaaccaggcctggtcagactctaatctcctcccaatgcaaaacccatccagaccgagtattgcagctcagagaaatcagactcaggacaacgattccccatggtgtctcctagttgatttcattccaaaatttttcaagaagaaattgctgcatacctgtggtacagttttttatagatatcgacattgccggcacttgtgttcagtttcataaagctggtggatccgctgtcatccactattccttggctagagtaaaaattattcctaaaaaagaaaaccttatttgtgataatggttaaggcataagcaaacacaaatcctatactatgtcataataccgctcatacgacattcagaataagagggaaaaaccttagcatttaggaaaaaaaatcacacgttctaaccaagtgctagaatattgtaacgatttttcgattcaataaccctaaagtgtcagacaaaattccttcattggtcgtgtttcttatccaggttaggatcaagaaactatgagaaggacataggattgtataatcatacacacatttaatctaataaaaggtacagatgttaacatggccccagttatcaattccaccaggttcctggactgtgatgggggggctttgctgtgtaattcacccctgctgtttagggatgtcacagtgactagctaagatgccaactttctcaccgagtggtaattcattctgaaaactggcatattgaataccctaaagttgcatagaaatcacctggggaccctcccatggaaaacaaagtggcagtagcatcctaccaccctctcccccgatgcctgagggctgccgcatctccccaggcagtgctggtaaatggtaaccaccgccccacccccgttaggaatcactgtcaggcgacacacaccctgttaagccttcccaccttccctcagagctacgagcaggaatgacattttttaagtatcagtctgattgattgattctctccccagctcaaaaggcttccatggctcccgaatgaagtgaaactggcacaggatttgtctctgctgctctccccagcccaaccctcctcgccagctgttctggtccaacctctacccagggaggtgaatggaccctggctgagaggcaccttggaaaaagaggcacctaacgccctcagcctacccctctgaccagatgaccacagcactgggcactcccgagcaaccaggagtctatagaggccaaggaggaggcagggcaaggtggcagtgagccaaggtctgtgtgctgggcacagccctagcaggacaaattccacctgctggttatagggctcagcttttggaaggtgacaattgtccccagcactcatgtgccggtgctttcacagggaggcagagagagggtcttctcgtgtttctgctgtctgttactgtcactcggcgggtgctgccccatactcacttatagcccatgtccctgcaggccgcccgcccgtagttctcgttccagtcgtcttggcacacagggtgccaggacttcctctgagatgagtacacctgaaggatgaagtttggtccgtagaggcgaactgcacgagagggaggattatccatgagtttctttctttttttttcttttttttgagacggagtctcgctctgtcacctaggctgaagtgcagtggtctgatctccactcactgcagcctccgcctcccaggttcaagtgattctcctgcctcagcctcccgagtagctgggattacaggcgtccaccaccccgtccagttaatttttctgttttattagagatggggtttcaccatgttggccaggctggtcttgaactcctgacctcaggtgatccccctgcctcggtctcccaaagtgttggaattacaggcgtgagccattgcacctggccttgtcccaacttgtatcgtcctagctgctacccaagccccgcgctctccacggctccggaggtggcagcacagttcactcttctcaaggcactgaccgcacacaaagggaggccacaaatctattctttttctgctaaaaagtgctctctacacaagagaattgaaaacaggcattgggtccaaaacttgtacaaatgttcactgcaaccctcttaaaacagctgaaaggcgaaaacactccaaacgcccaccaacggctgggtgagcagaataggatatgtccaagatacacaatggaatacgattcagccagaagagggaatgaaattcagacacaggctgcaacctggatgagtgctgaagaccttatgctcagtgaaaggagccggacatactgcatgagccgactcacatggaatgccacttatattgtgtgagcccacgtattgcatgatcccgctcacatggaatgcctagagtaggaaatctatagacactaagtagattagtggttgcttatgagtaggagggacgggctgggaggagggatatggggtgatagttcaagggcttggggtttctttatgagctgatgaaaatatgctaaaattgactgtggtgatagttgcacatattcgtgaatatataaaagccagtgaattatatatttaaattttatggtacatacattacatatcaataagctgttttatataaaaaattatatctcaataagctatttcatatatatgttttatatataaaagcactgaattatatacttgaattttatggtacataaattagatctcaataagctgtttttaaaaatatataagataagccaggcatggtagctcacgcctgtaataccagcactttgggaggccaaggcgggcagatcacctgaggtcaggcgtttgagatcagcctggccaacatggagaaaccgatctctactaaaatgcaaaaattagccaagtgtggtggcacgcatctgtaatcccacctacttgggaggctgaggcaggggaattgcttgaacccaggaggtaaaggttgcagtgagctgagatcacaccactccactccagcctgggtgacagagcaaaactccgtctcaataaataaataaataaataataagataaaaggtttttttttttaaagtgctctttaagagagcactttgagcaacaaattgtccaggagactctaaatcaacattctgctgaaatgatctcagctcttttatttaaagaaacaaaacattacaaacaccgttgaagtcgctccctattcccaatctcttctctccctccctagaggtaaccaccatccagagttttggggactttttgctgggcaggataatacatggggtgggcgtattcacagaacagaatcccatgcagcttaagggttaagcagagcatcatgaacaggaagaagcttgaaaacagcgctgtgggaaagagagcaagtgataaatgatgcgttcaagtatcacgttattcatgcaaagctgaaagcatggaaacaatgctgtgtggtttgggagaaatacacatgggcttaaagtataaagtgaggacctggctatgctctagcctctcttcttacttcctacgagtggccctgactcactggacagtctggtacctgtgggcttgttcccccatgaaatgacttgggtctgattattgtctaatgcctctgtggtgagtgattccacatcctatctgtgagtcggtcacaggttacatgaatggataaacattgtgctacatctggacaacggaatattatttggtgctaaaaagaaatgagctatcaagccatgaaaaggcatggaggaaacttgaatgcatattactaagtaaaggaagccaacaaagtgaaggaaggtgtatgtggtgaaggctacatactccatgattccaacgctacaacatcctgaaaagaccaaaacttcggaggcactaagaagatcagatagctggggtgagtggggagagagaaacaggtgcagcaaaagaggttttaaggcaggagaactactctggacgatactatcattgtggctgtacagcattatgcatttgtcaaatcccacagaactgtacaagagaaagggtgaagtccaggacttcagttcatcataatgtatgcatcaggttcatcggtgttaatgaacgcacagcactgatgtgggatgttcataacagggcaactgtgtgctggggaggagtacaaggagctcgctgccctgtctgtttcattttctgtaaacctaaaaccgctctaaaatataaagtctgttcacttttttaaaagtaactgaaatgaatacacttcttcttcttcttctttttttttcttgttcccaggctggagtgcaatggcatgatctcagctcaccgcaacctccacctcctgggttcaagagattctcctgactcagcctcatgagtagctgggattacaggcatgcaccaccacgccggctaattttgtatttttagtagagacggggtttctccatgttggtcaggctggtctcgaactcctgacctcaggcgatccccaccccctccgccccccacctcggcctcccaaagtgcggggattacaggcgtgagccagcacacccggctcaaaatacacttctatgattaaaaacaaaactgccactgtggctcaaagggagacacttcattcttggcttgtgggtaattttagggattttctttcccttccagctatctgcacccggaagagacggcagctgataagccagagagctggaaaaggtctcaagctagtccttttttttttttttttaaatattaggattttttttctcagctttgtcaaagtatagttgacaaataaaaattttacatgtaggcctggtgctgtggttcatgcctgtaatctcagcactttggaagggcaaggcgggaggatcacttgagcccagagttcgagaccaaccccatctccaccaaaaaatataaatatatatgcattagcctggcatgatggtacatgcctgtggccccagcttttcaggaggctgagggggaaggatggattgagcccaggaggtcgaggctgcaatgagccatgactgagccactgcactccagactgggtgacagaaggagaccttgtctcaaaaaaacccaattgtacatgtttaatgtgtacagcgtgatgactggatatccgctgtgaaatgctcaccataataaagctagttaacatgtccaccacgtcacataattaccattttcttttctcttttctgtggtgagaatacttaaaatctgcccttttagcaaattccaggtatagagtacagcattgataactagagtgaacaatttagtttcttttctgagattctgagaaagactcacagaaaggatagcaacggaagtagaaagtgaattagtgttaaaatatgcgcacacacacccttgggaagaaagcgctacacacatttttgaatgttttccatgggacgggtcatattcttcagcatcctaaggtgttcatttcagcaaaaacaatttctactctacgaaatggacaaattaaaagtgcaccctatgcctgttctggtctaagagagaatacatgcacagcgttatgtttgtctgtttccttttatatgaataatcaatatggaaactggataaaaccaaactgaagccggtctaggtctgtcaggttacagatccacacgccctctgacctagcagttctactcctggaagcgtttcctactgatatgctcacacacttggagcagtgtgtgttacagcaaaaggatggagaaaaccttaaggtccaccaagaagagacaggggcaataatggtgcgtccatgcaaaggaccaactgtgccatggtgggaaaaaacagggggctcatttccctaaggaatgctgtccaggatggtatccagtgcaggagagtcaactggctaggaaccactgggaaatagggtcatggtaacgcagaaatacctgtgcttctttatgcaaaaactctctggaaagagaagcaactcagatgagttgccccaagaaatgtgattggctggtaaacaggtgggcatgtatgggagtgatgcgtgtgtgtgtgtgtgtgtgtgtgtgtgtgtgtgtgtctggggtgtatggggggatgcggggtaggtaagtaagcagagcaaggaagaagagatttttcacagcatacccttttgtacttccttgattttgacctaataatactttaatagtgtacaactattaaagtatttaaataaatacgacttaaatattaagaagagagcaactcttcaggtaacataaggactttgttggtgtttattcacccacatgtgcacataggagaacatcaaaagccattccaggccaggcgtggtagttcacgcctgtaatcccagcagtctgggaggctgaggcaggagaattgcttgaggtcaggagttcgagaccagtctggacaacattgatgaaacccattttctacaaaaaatacaaaaattagccaggtgtggtggcgagcacctgtagtcccagccacttggggggctgaggctgggggatcgcttaaccccaggacatcgaagttgcagtgagccatggtcatgcctctgcactccagcctgggcaacagagtgaaaccctgtctccaggaaaaaaaaaaaaaaaatagaaagaaaagaaaaagccattccacgtgctatcttaacctcacgctactcaatctcaaaaactcccactttattttagaaaccaaataaagcaaaagaactatgtttaatcagcaaatgcatcattttcaagtgcaaacctttttctgggaagcaagactgtgctggaggaaaggtatcaagaacacggaacacttgggcctgctcaaggccggcacgagggccgagctccacgggccagtgctcctcaccaggaaattccacagccaggactgacagcgagggcttaacaggaaaccagtccccaccaaggatggcccttaggagaggggggattactttggcatggaaaaatctttggctagaattctcggccagctctgaggcttgtggtttctacagaaaactccaggaggttaggactgcacttgagggaggggaggagaactacctaagagatttctggtaagtcctctgactctacaattctgaaatttctatttctagaaaaaacaaatggttctagtgtaaacatgtcagagtgtgcttagctggaactaagatatgagagcacacaccaccaccaacgctgatccacaagcctggaatacatggctgtgcttgggaaataacttttttttgttttttgagatggagtctggctctgtcgcccaggctggagtgcagtggcgcaatctcggctcactgcaaccccctcctcccaggttcaagtgattctcctgcctcagcctcccgagtagctgggactataggcccgcaccaccacgtctggctaatttttgtatttttagtagagacggggtttcaccatgttggccaggctggtctggaattcctgacctcgtgatccgcccacctcggcctcccaaagtgctgggattacaggcatgagccactgcgtccggccaggaaataagttttaaaggaagaggaagaaaagtaaaaggcagctcttaaagagaaacgagccagctccctgccatctgcagagccccattccgtacgcagctggcaggagggggatgattagcacaaccctcatactcaggatcgtttccctgttcgagtcactaactacccttgaaatcaccctcaaaaattcatgaaaaatacaaataaaaatgcaaatgaaaaccacaatgaggtatcatctcatacctcttcaaatggctactatcagaaagatggaaaataacaggagttggtgaggttgtagaagagaaatggagactttgcaccgtgggggtgggagtggaagttgctacagccattatggaaaacagtatggagtttcctcaaaaggtgagaaacagaactgccatgtgatccagcaatctcactgctgggtttatatccaaaggaaaggaaatccgtgtgttgaagagggacctgcacgcccacgctcactgcggcatttttcacaacagccaagacatgacatcaacctaagagtccatcagtgaatgaagggataaagaaaatgtggtgtatatgcacaaggcaatactattcagccacaagaaagaaggaaatcctgtcatttccaacaacatagatgaagctggaggacattacgctaagtgaacaagccagacacagagacagaaacactgcatgaggccacttacatgtggaatgtataaacatcaaactcacagaagcagagagtagaaaggcagctatcagaggctgggggcggggggtgacaacactggggagatgttggtcagaggtcacaaaatcttagttagacaggaggaataagttcgagcaatctattgtacatcatagtgactgcagttaataaactatatgttgcatatttgaaaatcactacaagagtaggttttatgtgttcttaataagacacgtatatgaggtaaggcccatgttctagcttgacttagccatgccacaggcatacacgtatccaaacatcatgtggtatgccataaataggagcaatgcttcctagttcattaaaatgaataaatagataaaccacagaaaataaaatgaaacagatgagcccaccctgtgacaacagatagatctttaaaggcagcttgttttgaaaataacatagtgcatctccaattttgtttttaattaattaatttattttttgagccagctctgtctcccaggctggaatgcagtggcgtgatctcagctcactgcaacctccgcctcccaggttcaagtgattctcctgcctcagcctcctgaatagctggaattacaggcacccgccaccgcgcttggctaatttttgtatttttagtggagataaggtttcaccatattggtcaggctggtctcaaactcctgacctcaggtgatccatctgcctcggcctcccaaagtgctgggattacaggcatgagccaccgttcctagcctgcatctccaactttataaacagtttgctcatcttaactgacttcctgtggcagttcagagcacgtgtggttccaatgacacagtcctcggtggccctgtcatctcccacctgctgggtgaggttgggccggaaacacaacctctctgagccccagggctcagcctggagcagggattcaatgacatcatgtgtcagcgtactggacgcacgccaggcccagtcacccaaaggcccctggacccggctgctgtctccaaggtgagcagaggagtcccttcccaaggtcaaggctgactcaccacaccgattctcgtcctccccgccggggcagtgtgacacgccatcacaccagttagaggggttgatgcaggtacctgaggagtcgcactctatcccagagttggagcacttgctgcccacttgcagagaaaacagaagagaggtgcccttcaggctgagaaacgcaatgagcctcatggagtgaggaacaccgtggcattactgtagctcgctgcagcctccaactcctggccccactgtgttttgttttgttttgtttttgagatgaagtctcattctgtcacccaggctggagtgcaggggcacaatcttggctcactgcaacctccaactcctgggttcaagtgatcctcctgccccagcctcctaagtagctgggattacaggtgcacgccaccacgcctgactaatttttgtatttttagtagagatggagtttcaacatgttggccaggcttgtggtctcaaactcctgacctcaggtggtccacctgccttggcctcttaaagtgctgggataacaggcgtgagccacctcacccagccaatcccccactttaataaggaggagaagtgtccttgccaccagcaagtataagtggaattagcactggggcaccttacttccgtgggggcaatgggaaggaccctctcagtgtttgggtttggacggcactcacacgtcctctctgccacacaggtaacttgaaggatccacaatggcacatgggtctgcaccaccccaggctgatgggaaggctcaggctgcagttgcaggaggtgggacatggaggggtgggcctggtccccaacagccactgctgtgcagtgagatacaggtaactgggtgtggccccaaggtagaagaacctgtgctcacagtgctgggtggcaccaagcaccccaaagcactgggtacattctaaatgctttccccatgatgtgtcaatctcatagctaaacaagagaagggaagagagacagcctcgttatgtaagagaggaacctcacggagggcctccagaggtctcaatagcccagagagcagggtctggctcagagcactggggactgcaggagcacatggtgggatcgaggctccctgcacttactgaacttccagagtaggccagcggccagcgcagctcccacgaggaaggtccccagggtcaaggtgatgcacagtgctttcttagtctctggaagaaggaggagagtgcaacgttcagaccagagttgtttagaagtcatgctctcaaatgttatctattatttttatagtacaccacattaagaaataattatttcatatacacttaaaaatgtgacttttaattttaagaaatatcatggacgatcctacttcttccataacactaaaccttatgcaatttggagaccaacaggaggaagctgtgatcttcagcaaagtacaccgaggttaggctcttttaaaaagtatggtatgcttcgctgggcgcagtggctcatgcaggtaatcctaacactttgagaggctgaggtgggtggatcacttgaggtcaagagttcaagaccagcctggccaacatggtgaaacctcgtctctactaaaaatacaaaaattagctgggcgtggtggcaggtgcctgtaatcctagctacttgggaggctgaggcaggagaatcacttgaacccaggaggcagaggttgcagtgagccgagatcacaccactgcactccagcctgggcgacagagcaaaaactctgtcaaaaaaaaaaaaaaagatagtatgctaaaagagggtcttaaaataggcagatgattaatgtaaaaaaaaaaaaagaactaagacctcatcttggtaattacaagcataagcaaaataataatactgtcctaaaaactatcatcactctgttagtggtactcaaagcagaataaattgtcttacccaaggctatttagcgaatggatgctactgtcccattcggacatccaccaaagctacatgtggctatttaattaatgtcccatggaattaagtaaaatgatgtaaattcaagtgctcagtcatcatatgtggctggtggctaccatgtcagacagtgcagctgtagaaccttcccatggtgtccctaagtcctgctggacagcgccagtgcaggccttttggtccaagtgcagaaataccaaactcagaggaaaggcacatttcagaaaaaaaacgaatttggaaaaggtcactgatttttctctagtgagacatagcattattggtcagagggtaagccaaaagtcacacagagttcagaagacagctacaggtgccagagaggcatggcagagtcagacgctgggctcagccagctcatgggccaggagggagggcatccatccccatcaccccagtgatgcccagcagccccaggtccaggagctcccaggagctttccctgaagaaaggtgcagaggtggaggagaggggaggagaaggcatttgaacagaccctcccaggctggagaggtggtgtggcagcctggaactccccacctggccacacctgtgcctccggaggtctgccagggcgataagctcagagctgacccatctgctgagggctcgatgccatacctctctctttgtgacaacattctgataattctaccatcactctcaaactgttacaggcttaagaattacctggggaatgtggtggttcccatcaccagagattctgtttcagttgggggtcgggcatgaatctgcattgcattttttttttttttttttttttttgagacagggtcttgcttgttgcccgggctggaatgcagtggcacaatcatggctcactgcagcctccacctcctgagctcaagccatctttccacttcaacctctcaagtagctgggaccacagatgtgcaccaccatgcctggcccatttttggtagatgaggtttcaccatgtttcccaggctggtctcgaactcctgggcccaagtgatccactcgcctcagcctctcaaagtgctgggattacaggtgtgagccactgcacccgacctgaatctgaatttctaacaggctcacagatgaggccagcaccactggtctgagggccatgcccaggcacacgatgttctcataactcggctgcaatgattatatatgatggaggcaagctggggccaaggtagttcatgagagaaattccagatgccctctctggcccattaccaaggacactttcctccgtctatggcttcccgagtgccattttatccaagataaaataactggtctgctgagatgagggctattcagttaggtatcctgaacctcacactgagcatgtgccaatctgtacagttctcaccaggagagtgtgtaaagcgggaagccctcaagtttactttgctggacaggcatctgtagtcagcgcgtggtcagtacagacaccactgggtcttggcttgtcacggctgctgttgcacagtttaattacaactcactggcccggcacagtggctcataccacccatgcactttgggagtggatctcagcactttgggaggccaaggcaggaggatcacctgatgtcaggagttcgagaccagcctggccagcatggcaaaaccccgtctctactaaaaatacaaaaattagccagaagcagtagtgcacctgtagtcctagctactcaggaggctgaggcaggagaatcgcttgaacctgagaggcagaggttgcagtgagctgagatcgtgccactgcactccagcctgggtgacagagcgagactttgtctcaaaaaacaaacaaacaaacaaacaacaaaaaaaacccacgcacacaaaacccactatccatttccctcaatcatgaccaacttaaggttgtcaactcagcctcatggtttctcacgtttagctgcttgtttcacacgcacatttggaggactatggaccttcgattctccaaagcctaaggtttaagctgtgtgttcgctcctactcaatcatcaaccttctacggctgttgctaaagcaaataaatacattaagtctagaaaaattccttatactcctgatgggtgcttctgaattggtgctactcaataactgggagaagagtttcaaagccaaacattacactttcaaaatgtatacatttctatatattagatgccaacagtgttttcttaaaaatagtaccagggtaagttcaattaaattactaaattatttctgagtttataaattttataatgcaaaaatcatacatgtaggttcatattcttcccttataaaagcaactgataagggactgatatatccctgtccaactctgtcatcatctagtctttcccaggaaacgtggaaatgtgtccatcatgtgggccaggggttcgtctgccttcctgggtttagccatcactggtgggaacaccaccgtctggagatgctgacttcaggagagggccttcactgccatttcttaggggggtagctcacacagacagttccttatccccttcaccctggcttccttccatccccacggtggacaaagatcaggagttcccaacctccacactaagcgatattttacctggaggattctttgctgtcggggggctgtcttgtgccttgcgggaggttgagcagcatccccggtgcctacctaggagcagcaccccctccccacttgtaaccacccacactgtctccagacaccgccaattgtctctgggggtccaaattgtcctgactgagaaccactggccttgacctacccaaccacccccagaagaacatcagtgcaaacacaagtatctgcttggtggggagcatcggaagaagggaaagagagaatgagagaagggagagaaaggaattaaggctcatgaaggggtagaaaactcagagacaggaggtggctggagaggaacagggtggaagagccatttgtgaagggtgagggggtgagaggaggggtagaaacgcaggagcggcagcacttgtcctgagtgggggagaggtggggacagacagggcttcacagagcactggcattaatcacgttgatgactgattatgtgatgtggacacatggaaattcacattctgacgaatctctaactgtacaagttgtagagacaggatgcacatttcacaaaataaaataaaagcactatcaattaaaagatcaatgtaaaagatctttggcgtagccactgctgtgcgggttccacctggacaattcttagcactgaaactagcctgaattaacagctgggaggcagtgcaagaggggcggactggaaagacatgagaccaaacgaaatggcaaagaaaggagatgaatggtagggtgaggaagaggagggactgaagtgacagcaaataaaatttaacctccagtcctcccacgctcgctctggcctgctccggccacccgcaggaccctgaagcccaatgagacagctcagatacttctgtgtgacaaccgcaccagccaggtcatctactaaacacaaagtaacagagagcatcttaaacatgacctgtcatatccaggggactgtatgacaaaggtaagatagttgatttctgctcttggaagcttaccatttattcaagagcagccaccaataaaccacacagccaagaaacccagagaaggtgatctcgaagcctacgctgagtagaacaggcaaagctgtacaggagagttaacggaagagggaggtatctgcaggccctgggcaagaggctaggcctggcagcgacagctttgacccagcaggaagagagtggaaaggcatgaagacaggctggctccggaagacggaggagaagggtcagaccaggagaggtggcgacagtggtgttgggagcagagagcccactggggaggtagacccgggaccccgggtttattacaggaaataaacacaaagagaatcctacttgaggtgcacactgtcccggatggggatttgggctgcgtgcagacgacggggttggaagcctgcgtcaggaccctcggggcgtactggggcacgggggacgggtagtactgagccggatgcacctcgtagacagtggggaccacagtgggctgtgcgggataggggttttccggttggtatccatggttttcatagtaaggtccaatagctggtggtgacccctaaacagttgaaaagaagatgaataatataaaactcttatttgcactaaagggttacatacaaactatcacatcataccacagctataccaatgatcttttaaattgataatgtttttattttattttgtgaaatatgcatcctgtctatacaacttgtacagttagagattaataagaaagtgacaagatattaaaaaggtactacaaggctgggtgcggtggctcatgcctgtaatcccagcactttgggaggccgaggcgggcggatcatgaggtcaggagatcgagaccatcgtggccaacatggtggatccctgtctctactaaaaatacaaaaattagctgggtatgatggtgggcgcctataatcccaggtactcgggaggctgaggcaggagaatggcttgaacctgggaggcagagattgcagtgagctgagatctcaccactgtactccagcctggcgacagagcaagactatgtctcaaaaaaaaaaaaaaaagtaatagaaaagaagaggtactacagattctccctaggtgtctacaactatgtcaaacattgaacttatttagaataaaaactaaccagaactttcaattaccaaagttttttgttttggtttggttttactattcattctttttttcttacatgtctatttattaaacaggagttccttcatgacaatttaatacaatatttattcacgattacagttgagaaaattatttccctctacatacaaaaatacagatttggctgggcgcagtgggtcactcctgtaatcccagcactttgggtggctaaagcaggtggatcacctgaggtcaggagtttgagaccagcctggccaacatggtgaaaccccatctgtactaaaaatacaaaaaattagccggatatggtggtgcacgcctatagttccagctgcttgggaggccgaggcgggagaattgcttgaacccgggaggcggaagttgcagtgaatggagatcacgtcactacactccagcctgggcgacaagagcgaaactcccgtctcaaaaaaaaaaaaaaaaccactatgaaaacagtcaagacaagtaccatgaaaaatgggtccttcaaaagaaagaaagagggaaaattgaggtcattgtgagactttgtctgctgttggggagaaatcaatggcagcaaagctctggggcccctgacccactcaagacgtacagactcaaactcgagaaccacacaagccagggcaaacccaccccagggcttctgcatctgctgaaaagccaagcatgcaaacccaagtttgcccaatgggctatgtattctttaaaattaaaaaaaaaaaaaagtggcagacattgggatttagtaaaatatagtaataattttaaaaagttgtgtagaggtttggagttagaatccattaagccaaaatcctgtacttttagttcctccagtcttttccttgaatattgatatacaaaactgtaaactagcaatatcataattataatgagaagaataatagctaacattggagaactcagctgccgccaggctcctgtactcataatctccttgagcgctcaccataatccctcccgctgccagcgagactggcacaggtatgaattaatacaaacattttgcagagaaaaaaactgagtgaagaaatgttcctaaaggagcatagtctctgtgttatcctgcaaatacctcttctacatcctcttctctcatataaggaatgtatcgtcattcactcaccatctgctattaatggaaatttgagtggttcacaacatgggctgttagcagctctgctgcaataaacattctgacacattacatgcatttttgtgcagagggtagaaaggtgtagctaaatccctttaaatgaaatttctgggtcagagtgtggccatacataaatgtgaaaggaactgcctagaagtagcattttattctcagctccatccttcagctggtgcctatcttcttagaatgcccacctccccttcctcagcctacttaaaaattgccttcccgagacctaccctgtcaagactcgccccaaacaggccactctgggccccaccagcccacatcttccccttctttcagctctccccggttacctgttggctgggccactctgggaggccacgttttcctcttatctgtatctaagggcccccatgcaaaactttttcctattcattaatttctgcctcttgtctctctctccttttttttttttttttttttttttttttgagacagtgtttccctctcgttgcccaggctggagtgcagtggtgcgatcttggctcaccgcaacctctgcctcccaggttcaagtgattcgtctgcctcagccgcccgagtagctgggattacaggcatgcaccaccacacccggctaatttttgtatttttagtagagacggggtttctccatatttgtcaggctggtctcgaactcccaacctcaggtgatctgcctgcctcggcctcccaaagggctggatgacaggcatgagccaccacgcccagcctgccccttgtctcttattgacctcagagaatgacagcaagtttgtactcaatggacaggtgttctgagcagaggcagcatagctcttagaactttaaatgaggcctccagggaagttgattacaatggaatgagccaaacaaggcccgcagagttcacctccacttaataactcactaatgctgtccttcaaaagtccgaagattacagctctgaaccagagcagcacacagagggaaaacacaaggtaatctctcatctaaatgagggagtcagaggctgcaatctcagccatctaagaacttgccatccactagcaagcaggtttgtccctgaaaattcctgagcagtggacttgaaattaaacacagacccagtaaaaaatgaatatcagtaacaaataaaggggaaaacaaggtctattttccagatatagaatctaggaagtgtttaaaactctttactaaatgcacttattttaggtataaggcaaacgggccagttacaatggggagcagagattagccacatttgtctccaaagggagtgggctccagggagagggaaggcccgcccatgcctcatgcagttatgacttttcctagtccttcagttgggcatcgatgggatcccacgtgggtctcttccctggaacatacccctgttatcgccatcctgcctcatctgtccccactccttgtccctgccccctgccctgcaaagcaggaagggatgaggtcaaggtgagaatgcatatcacccacgtgtacccaacagccatggctcttgcgactcacctgggcagctgtgtggctgcgcacctgactcactctttctagagggtgccttgaacagcatcagcgtggcccggcgttccctacaaatagcccttgcaattgctgaccccaaacaatgttgggaataacagaagggacaagggaacaaagaaaaggccaggaaggtaataattaaccacttactgagttcaaagccatcttgctgttatcaacagcatcgagtaatgataggtatctggaatgttcaatatgacctagaagaaagaattacaggactgtaatatttccataccagttagtttttagaagataaatctggaaagaactagaagaatctctagatgaaggttacctacaacaaagaccagtgttgcctgctgacctttggcctgcatcttcaccactgcttccccacatccctccatatttaaggactttgggacccacttgtgccttagaggttacagcagaagcactctcctctgggatcagagtgggtaggaggatggggtgcaattgtaagtgcagcggccaggacagcctgaccagaaagaagaaggaacacactcagtgactcaaacatccatcgggaagggctctcaggggactgcctggggctcaaggccacccacaactccagtgccactaagcccaggcatcctgctggacttaacccagttctcaccaggaagctgtgatatcccctatacagaacatctactcaagggagactgtatggcataaaacactgaagaaacacgacaaggtaactaaacccatcaatgtcagcagagattaaggacaagatgggcccaggagggaaagacctgggccagttcctggcaacacagctccctggaagtgtcgatgtgtgagttactgaaccttgttgaaatctcagggtcctcatgggaaaacggacaaagcaatcaccacagttgtgttaagctgagggttgtgggagagtggggaaagagtgcctcacagtactaggaactgaggaagagcaggtgcaatcagaccgtctttccccgagaacgtccacaggcactgccagtagccacccactgcccagcgggtggttcagggctcagcaccaaatacagctcacagttgactttttaaagcaggccatgtgggccctctcaatttttaatagatacatacgcttaaaataatccataaaacatgtccacagtcactccatttactaccccaaacccaaaaaagaaagaaattcagagccaaccattttgaccactgctaagattagcagtaatgaaaagaaagctgtgggccattttgcttgttgtcctttgtgaacagttaacaataatagctagagatgccgtcaacacgaaatgctgtatagtaaagccgcattctgacatcactctccatggacaaagattcttcgcttgatcaaacttatatcaagctcctgaaccttctaggccatctgtgcatttccttgtaaaatccagttttagcaaaaaaccttgctcagtcagtttagccagaacctcccaccctcggtatctgatcactctggatatctgatcgggttcctcagcctccaccgtgccacaggtgatgtctgatcacccagcctgtcttcagcaagaatcctgtttggttggtttagccagaatcccccttacccttgatgttttctctttgtgatttttccacccaccaaccccaccctgatccttggttataaattaactcccacttgcccatactgtactcaagcggatcccagtctcttcttcccactgcaaaatctgctggctgtggtccctgtacctgcctccgtggtcctgaataaagttcgcttcaccattttaacaagtctcattggacgatttttttttctttaacatgcaccttcctgagcaaataaagggcttttttccaccccttcccgcttggctttaaatgaccaaagaatattttaagaaacggggttcaagattatccgtccacaagaccatgttcccaatgagggaacaagaacctggaggaggctctgggcttcggacctggccagaccagtgtccactgtctgtgacatggccacagaagaatatttcccagttgctggcacaaagcaggtgctcaaacagcagcaggcagcactgggcagcggttcagcccctgacctctgagactagactctagatccaaactcaggctcagccactcactctccatgacctggaggaagctattgaaggttctgtgcctcagtttccccatctgcaaatgcagataatagtaacacctacctccagggcattccatgagttaatactaatgaagtgcttcatgcttagcataaaatgagtgctatataactttccattaaataagaggaattataaagctgataaacatttaacaacctgctgaaggaaaagagggctgtcttgattcgcaggtttgccttcggtaagtattcccaggctaccaacatgaagcccaccacggagccaagtagagtggggccggcttcagtacaccatcgctttcctgtgtcctaagcagaactggttgctgaatcattaaactataaaaccccaacagcctgccatgaatgaaaatgagtatatggctttttagtctcgagaaacctcacccaacaggttacaacaaacatgcaccaatcatttatttactcttcaattacagataaaaatacaagaaccaggtcatgttgtagctttgggactttttctaggattaaaactaaagttcacaccttcctgggtataaggaaaggaaagtgactaatgtacaggtgggaaggatcaccatttaaaatgtatcaaaaacgtttaagccttttagccacatcttaacagaccttgcctatgtctgctttgtgaagagagaggatcctcaggcttgacaacacaataaatcccgcattcttgtctcataagcaggacagaactcagtaccatcctaagattgctttcaaagagtcctgcctaaccaaacacatcctcatgcctctggtttctcggctgtcctatctccccagttacaggtttggttgaagtttcaggaagtgaaaattcgatcccattggcagctctcccagctcagaagccctctgaaaggagtgaagaatcaatactcaaaacccacacttgctattcattcacgatccctaacaaggaagccagggaaggaaggaacaccgggagccaccaccattaattgtcaaataaaagccatgggacccagaggcagtcacaggataatcctatctcttccagcaatcagaacatgataaacaaaaatattccgtgtgcccaagtcagttaccatggactttggaatggaagaccagagtgatgctgccagtaacattctccagctgggccgggcacggcggctcctgcctataattccagcactttgggaggccaaggcgggcagatcacctgaggtcaggagttcaagaccagcctggccaacatagtgaaaccccatctctactaaaaatacaaaaattagctgggtatgatggtgggtgcctgtaatcccagctacttgggaggctgaggcaggagaatcacttgaacctgggaggcagaggttgcagtcagccaagattaggccactgcactccagcctgggtgacagagagagactctgtctcaaaaaaaaaaaaaaaaaaaaaaaaaaaagaaacaacaacaacattctccaattgaaaataaaacaagggggggaatgtcccgctctgacattagatctgcaaggggaagcactgctgtcccgaaaagaccaggaaatcacattcagtcctgttcatcttcaaaacaggcatttcctcattcacacaagcttgtacatcgcattaactcatttctgaaaggagcaagacgtaaagtagatggcgagagacaatgctgtttagcgaatgcttgctcctgtcatttaaaggaccgggatgatggctctcaattctggaaagccagccaccatgagcacttggggaaattttcctttaagtgtgaaagagcaacagtgggtggcactcaggctccattcctggctggcagggagctcttccttcaatacagacagtgtcacccacttgaatctcacaatggcacacagctgtcctcgcactgttttggtccatcctggactgagagctgagtcagcccatgagtcacctgcctggccaccatgcagcaggacgatgctgtggcatcgtatccgcatcccatgacatgatgaagttactgccaaaacaagaatcttttctcctagtttctctcctctggagatctcaggacacgtttactggagacttactttccaaacaaccaagccaacgcgaatgaagttaggcttgtagacactgactcccacccaagatccaggggtattctctgcaatgaagtctccactgacctcaccgtgcaccattgtgcacacaccttctccttctcgaagcccccacctgtgactggtacggttcgagttgctggaggtgtgagagggaacagacagcctcagactcagtgccccttcttcaaaatccagacagcaccaccaccaccatccacggacacatcccagccaatgaccaaatcatcaaaaagagccctttatgccaaaataaccgcactaatatcacattatacaacgagatgttctatcctcctaaggatagaatgcatgactaaatgagttagccaacagtggatttcagtggctgttcagcagaaacttgtttatgtataatcaggtaaattgcatacacaatgattggcacaagagttctactgagagagaaaggttgagcgagaaacagaaagatcaccttaggagaggtattgcctgcatcatccaagtttcttttcctgtgaatgactcattgtcccaaagagattacaaactttttagggcagatatcaggtctggttctctctctttctgtttgttttttaaatctcactttgtagcttacaaagacagtatttaaatgtttttatggagttcttaccacctgtaccccaaaaactattggggaaaaattaataagcatgtttggcaaagttgagggatacaagatcaatataaaaatctatgtgtttttatataccaacaacagacgatcggaaatgtaaatttgaaatacaatgcaatttgcaggaaaaaatatatattttttgagttccaaaggccaaatgagtaagatgaaatttagcagagggcgataagatgcccacacccagacaacaccagcagcccaagtcaggacagtgggtgacctcccaggagtccaggtgcctcaagctgagtgcaacctggcatgacaggcaggcaggcggcagaggccctcaggtcactccaggcggagacttcaacaccacacacaagccactggctgaggcttaaagaacttgtccaagtcaatctgtaaaatggggatgatacagaaatagggttgttgcagggattaagtgagaaagcaaggccgtagctcagtgcccaacccatggtgagcactcaataataacataatgatggcagataaggtttatcttccaacacgtaagagccggctatgtggaaaaggaattcagtttattctgcatacatccaaaggacaataccagaatcatgatcagaatttccagaagagcaggcttggattctatctggggaaatcaaggttccaacaattagaaagttcacatatggcctggagctaccttagaatgtaccgaattcctcaaacctaaaaatgtatgtttcaagactggaggatcatttctccaacatattccagaacagaattaggcttgagcatcaagaccagacatagtgatctttcatattactcccaactccttataaatgcatcatcaccagtgaacttgaaaatgtcagcaaattctctgttatcagtatcttgcacaaagaactccaagcccatcgtccctagaaagcatggtctcccatgacccctgggctatactgcagtggggtcaggctgagtgccccgccaggacagccccttggaaagcaatggccttaaagggaatttgacactgcattgtgcacctcgtacaaacaagcaataataaaaagcctcagcttagttccatctgccaagtcagacctcgcttgaaaatatttttctaacaaatccaattgtcacaacctctcattctgagtcccacttgacagccccgatttttccacctagtctgcccttgagtgaacttccagacttctgctgccacaaccacaagccaaggtgcccttcaaacacttcctgctttcttaccacaactctgtgccctaaactcctcctgccctcctgccatggatgcccaatggctcagcgccatccacacatagatgtcagagccctcacctccctctcccagactcacctccaggaggatgaaaagcctgtcttcgagtttcctgccctctcaaacttcactctgtttacaacaaaagtaaccacccacacccctgccagaaaaccagcctcgactcccaaccagcgcatttccactcattcagttcctctctcctgaccattgctcagcaaccaggaataaccaagtcccagatcaggctctgcctcctcctggagcccagcctctgttctaggtcatgctgaagagctgcctgtgtgctcaaccaagctgctaccctgtcacagatcccccttttgctcctccttgggtgtccacaggctcggtggggccaaggtggtcaatggccatggggacatcataagcccccttcttcacacccaggcccatacccctggtgcttgcaagtcagggcttcccaaatcacccttagggccaggaggggccccacaaaggctgactccatacaggcctcagctctcaggtacataatgctcctgcaccccaatcctgaggccacgcagtgcatcccatattggaggatcccctggcaggtgtcctggaaagtaaggaggggcggggaagagtagcaaaggcctggtgactgtgggatgagggacactcagggagtgcagagcaggagggaccagagagcagaaatgcacctgggccttcaatgctcctgggctctctggttccccacagggagctctccctgccctcactctccccactagcaaggccactttccaagtcttcagcaaccaaaactgaacaagcactccattgaccattcacctttcctttctacctcaatgtccaaggcttagatctgatcagtgctccccaaacccagaattttcaagagggcttagaaaaataaataaataaataagatgcctgggccccattctcagagtctgatgtaataattgggaccaaggcaatgatcccatattattacgaagatcccctagggaatcttgccgcagattcaggtggaaaagggtaagagttatcagccagacttttggtttacatttcctggtagggggacaacacactcggatgatgatgatcgtggtggtggtggttactggcataaggtactgcacgcatctaccttttcacctacaggacatttgcaccagcgtcttgtcactcaatgcccccatggcctaggaggtcagccctccgcaggccccctttcagagttccaggcactctggccatgtcatactgctagagggagcagcacggagcccaggtagggctgtgggcaggggctgggctctttcaggtcggggagaaccagagcctggcccaggaacaagcccttttcaatcaggattccgggcgccttgtttccagcttccttccctcctttcctccacttgctggtaacattccaacatcctggagggagaacccagggaaggatcaaaaggaatccgtactgtgccgattgtcactaaagccccttctaagcatcctgtgtctccaactcagagcccgacactggaagcactgacctatggagccagacaggccatgtttatccccagttctgccccttacaggttacaagatcttggacaagcttcccaacctctcttccccagtttccttacaattgagttaagtacattataaagggtttgcaatgatgcctggctgaaaaaagtgccacatcaatgtctgtggttattattataatgccagtgcagccaaatatactcctacaattaaggtgacttgagttcaagatagagtggccaacggtgccaggcaggccagcacctagcaacctgggaggccctgcctgaggctccagcaacagcacaagcttgttgttagaaggttgtccttggctggtgggaataagggaagctgctggggaccaaacaaatgtccaagcagagaacaaaagcccagccagctcaccagctgataattaaaaataaccagaggccgaggtgtagatggccatctccaggcagaggtctcagcccgtaggttgcaccccgaactctccagcctagtgtgtccttacccgagggtgttgctaggtttcattctaacctcacctgtccagtagttctgtagcggagcagggcaggtcctacttcttcaaaagcactcagtaaaggtggggaagtcctgagcaacctccagtgactttctgggggagctcccggttacctagcccaccaggtcctcccttcacagcagcagctcaggagccaggactgacttagctacttgcgtccccaaggccctttgcgctggtaaactctccctgccacactcccaacccccatccttccttcaggggaggctggctgcatccccacttcctggagtaccttcccagatctcctgggacaggtcaacaaacttagtctcactttaggttttccaaatgccttgtaactgggctgcgtagcctttgtaattttccatgattcgggaggttctcgcggctgggagctccgtgaggtcaggcattgccttgggcgcgatgcgctcatctttcccgcgggaccactgcacaggttcgcacggagggaagggctgcgcagcctcgaaggcgagccctgggtgctccctgcccacagggctcacctcgggccgccgtgctatcctttccttcccaaacaagccaccaggattcctcgtgattagggctgccaccagggcgttctgaacaggattcagggccaccgcgctgtgctctacggcggagcgggcgaaggccctcctctgccacaagcgctcagggctctcggcgcacaaactttctggacatggggcagtttttcagctggacccgtgctcgagcagagcgcccactgccagactggagcacttgaccactcagggtgccactgtgccgagccgggcaggacaggatgaggtggaccgaagcgcccaggtgccccgccttccccccaacccggcacggagcgcaagcggaggagccagaccggctcctcccgggcgggttcctgccggtgccgggtgtccaggaggccccggccctgatcgccgccagcgggtcgccgcaacggggcctgagtcgcgagcagtccctccccgagactgactggccgttcgcacctcgcccgggggccctccagcagcctggcccagcggtccccgccgcgccggccgtatcgttcccggcatctcagcgagtttccagtttctccctacctcagtagggaaccaagaagcagaaggagttcaggtaacactgcgggactgcagagatttcccccaaacaaagaagccaaccgacagcactcccagtcctcctccccaaagagaaaaggcgcaccggtgctcccaggcgggggccgtggagggcaggcggactaggagccagctttggggaccccgggggactctcttccaccaactggctagggactcgcaggaccacctgccccaacctcgcgatgccaagccaacaggggcggcgagggctctcggccgtgcgcaaggggtcccaggcgcccagcactctcccagcaccccgggaggcgccctgcccggctggccccagcgctcgaccctcgggcgcactcacctgccgcgccgcgctcctcacacccgctttcacctccgggcggggcagggggcatcggcgggtcccaggcgcccaggttcccctccccagcccggaccccgagccgggaccctggtaccggcgccgctcacctgccgcgctccaggcggcgctccccgcccctcgccctccgcctccgcctccgcctcctgcttagctcgcgcctactcggcccggcccgccctggctctcgctttaatctcaggaggcggtgtcccagggtccagggcgacacccccaagcgggtcgcgggtcaccctgggcgggcgggggcgggggcggcgggaggaggcgtttcccaagggaagtccgggacgggttccctgcctggctcaaccccggctgcggagggacccataagggactctggggcgcttcccgggcccggccacagcggccaacctgcccctctccggtccgcggcgcagcgctgcccgagggctcgagtttgggttaaggaaggggattctggggagcgctcctggagtcctgggtgagcccccggagctgctacctcacgagctcctgtaggcggccggccccgtcttggcctccggggaacccactgtagcctctgggcaaggacccagggtaggccttggggactgctggcccaagcacgagtggcggggacacagcgccggacgcccaagaccctccccagtccgcctaggctggcatttcttggcccccaccagcgtccggtggaaagtgctcccccggatggtcccaggtctctcggcaccaccggccagggcgggagtgaggaagtggtgggacacacctcagccaggaagacgtggctgttcccgggcacttgagaggttctttctaatgtttgcaattgtgggggctcagaattcaccagaatttaataggaccgtagaccagaattcatcaccccaagtaggactggaggagaccagaatctgctaccccaacatagtcctctttggcacattgatgatttggaactggttatgttgaggaactgcagacaccagagtacctctgagaaaatgcccttttgtaaaggaaatttgcacctataaaggaaatgtttgttagtcagcagatctgtaccaggaagagagctgttcccggacaacttttatcacctgggaaacttttatctgcctcacacggcaacctgcgttcaccagacacctcctctcctcacgctcccctcactcctccaccgctccccagaagcctcaaacccccatttctttctgtcactcagagtgacagataagcctcaatcatcgggctgctgcaccttttttttttcgtgtgtttttttttcccccagaaggggtctcactctgttgcccaggttggagtgcagtggctcaatcatggctcatggcagcttcaacctcccagggcacaagtaatcctcccacctcagcctcccgagtagctgggactagaggcgtgtgccaccacgcccagctaatttaattttttgtagagatgggggtctccctatgttgcccagactggtctccaatctgggctcaagcgatccacctgccttggcctcccaaagtgctgggattacaggtgtgagccctcgcactggacccctcactcacctggcctgttctttaagtctcatattcttgtgggattcccatctgtgagtacatacattaaaacagcttttctcctgttcatctatttgatgccaatttaatttgtagactagctgaacgaactagaagggtagaggggaagcatgttttctcctcccctgcataatatacaaatcaacatgatttgctttaaaatgaggtggaagcagaaaaaagccccattcagtcccatcccaggctgccttggctcactgctcccttcctgggaagctctcccggaagcctcctgtggggcaggactttcctagtaaacccttccctctcactccctcctttggcaccttttgtggtctgctggtggcacccacaacagggattgtccccaatatgccccagccctccccatcccccacactgccctgcgctctgccccagtgggaaaccctcaaagaccctctccagcacatagggcaggtgcagttgtctttcagcggcaactcacttatttctgtcttgacagtgtgtttggtgcctactaattccacccagaaaccagggagtaagtgctgccgcagactcaggcctcttggagtggttgttcattcaccatttatttttccttttatattaataatcagggttctccagagaaacagaaacaataggagaaatacaaatatatacacacatatacatatgcacacacatgtatatacacacatctatatttctatatattatttataaatattataaatatcttatatattataaatacatataaatatatacataaacatgtattttatatgcataatataatacagatatgatatatattatacacagcttatatgtaataaatattatttataatatatataaagatttactataagaaattgactcatacaattatggagggtgagaagctctacaatctgccatctacagactggagacccaggaaagctggtgttgtagctttcaaagtcctgagagccagagaactagagagcagatggaacagattccagtccaggtctgaaggcctgagaaccaggagtgctgagggcaggagaggatcaaagtccagctcacacagtcaggcagagagcaaattcaaccttcctccccttttctgttctattcaggctctcaaccgattgcccaaattgaaggcaatcagcattacacagtcttttcaaacattaatctcttccaaaaacaccctcacacgcagacacccagaaataatgtttaaccagttacctgggcatcccatgaccaagtcagcttgacacataaaattaaccatggctggatgcagtggctcccacctgtaatcccaccatttagaaggctgaagtgggaggatctcttgagcccaggagtttgagactagcctggacaccatagcaagatcctgcctctacaaaaagtttattaaaaattagccaagtgtggtggtgcgcacccgtagcccaaggtacttgggaggctaaagtgagaggatcagttgagcccaggagtttgaggctgcagtgagctttgattgtgccactgtactccagcttgtatgacagaatgtgaccttagttttatctaagcatgaatatatatgccaccataagttgaccccttgtcgacttcacacctacacatctccttacaccatactttatctctaaagacaatagcaaagtaataattttgcctaatgtgataaaactcttctgcatacaaccaaaaaatgcactaagcccttccccagaagtggatgtaaaattctccagtgtttacacttctccttggtattccataacttaaataccataatgtaaaattaacaatacttaatacaatgatataaagtcaatatgccttaagttatgtaataaaggaatatgagagaaaagacaacagagatatatactgtatatacaaatatgtgcacaaatgtatttagaaaaaaataatgagaaaatactcgtgacaatctaatgctttataacaggttgcatgggcaatagctggtgtttgtaactgtcttcttccactacccactctgcgttccctctgccttcgggaagcatgacagctggtcatggttcttaacctgatggagtgatacaaaccttcattcctcaagggtctgggccattaatagccctgcctggattgtgttgtagttttccattgaccttaatcacaagcatggtaaaactaaaagatgccctaaggaatcgttgtattccagacacactcttccttaccttcctggtggagtagaagtagtctatagcttctccttggtagtccagatgggtctccccagccaatgcataactctctctttgccttttgattcagaggcatgtggagctcagcgtggccaggtggcagtcgtaaattctagtttaattgaatcattgttgtgtctcctggtggcagcattcctccctccggaactaagacctctaggtcagcagagcgtaaagtcacagaaacagcaagcgaaaattttgctagtgggccacttggagtaatagtgcgtggtgccactcccatttccaccccttgattcctggaccagtgaatcctggctatgggagaaacagcaccgcatattggatgctgatttggagcatacacagctttctggagaaccttgccccagcctgcagagcattgtcccctagccagcactgtaactgcatcttcaaaaggcgattccactattctatcaagtcagctgcttcatgggggtggggaatatgggaagatcagtcgattccatgagcataagcccattgccatgcttctttgagaagtcagttccttggtcaaaagcaatgctatgtggaataccatgatggtggatgaggcattctgtgagttccaccagaagcgctgtgtgcagggaagacaaatctgtatccagactgcctattccagtaaggacaaaatgctgccccttccatactgaaggtggtccaatgtaatccacctgacaccaggttgctgcctgatcatctggggaaccgtgccatatcagagccttggtgctggtctctgctgctggcagatgggcactcagttgtggctgtagccagtttggccttgttcagtaggagtccatgttgctgagcccatgcataatctccatccctgccaccgaggccactttgtccatgagcccattgggtgatgacaggagtggctggggaaaggctgactggtatctacagaatgggtcatctcatccacttgatttttttgtttgtttttggagacggagtctcactctgtcacccaggctggagtgcagtggcacaatctcggctcactgcaacctccgcctcccaggttcaagtgattctcctgtctcagcctcctgagtagctgggattacgggcacctgctgccatgctcagctaattttttgtattatagtagagacggggtttcactgtgttgccaaggctggtctcgaacttctgagctcaggcaatccaccccggccccactttatgactaaagtcttctcctggccgggtgcagtggctcacacctgtaatcccagcactttgggagtccaaggtcggtggatcacaaggtcaggagttcaagaccagcctgactgacatggtgaaaccccgtctctactaaaaatacaaaaattagccaggcatggtggcacgtgcctataatcccagttactcgggaggctgagccggaagaatcacttgaacctgcgaggtggaggttgcagtgagctgagatcatgccattgcactccagcctgggcgatagagcaagactccatctcaaaaaaaaaaaaaaagtcctctcctgctgaggtcatcctttggtggccattcacatgggacagaaatatcctcacatcctttgcccactcagagaagtctgtctacatacctctgtcccaaatttaccaccaattttcctatcatgtttcttccaagtccctgactatccagccacaacattgattacagcccatgaatccatatataattgcatgtctggccatttctccttcgaagcaaagtgcacaagcaggtgcactgccctacgttcttcccactgggaagatttcccttcaccacaatcctactggggtgtcccagaaaagggctgtggtgctgcagctgggtacttctgggtggtgccagcacatggtgctgaaccgtctgtaaaccaggcctgggtcttctctttctctgtcacctgatcatagggaacttcccatgtggccatgggtgcaggcaggggggcagagaaggcagtgtagcaggagtggagaccatgaacattgggtcacttctttatgtaatctacttaagctttcaggacctgatcaggcctgaccacatatagacacttccatttgacgatggagtgctgctgtgcatcctcagctttatgacgtggtggggcaggtaacatccagtccacgacgggagctcaggtcacatggtaacttgttggcccatggtcaagtcttccatctctactaaggcctggtagctggctaagagctatttctcaaaaggaaagtatttatctgtggaggatggcaaggctttgcttcaaatcctcagggcctgtgctacaattcacctccagggcctgcaaacagctccatatcacatctctctctgtcactgaaacttcaggcaccattggatctgctgggtcctatggcccaggtgtcagagcagcttgcacagcagcctggcgtgttgtaaagccttttcctgttctggggcccactcaaaactagcatcttttcaggtcactcagtaagtggcccagagtaacacatccaactgtgttgcctccaaaatccaaagacgccctctaagcattgtgcctctgttttggttgtaggaggggccggatgcagcaacttatccttcaccttagaaaaggcaactcaataggccccacaccactggacccctagaaatttcactaaggtagaaggcccctgaaatttttcagatttatttcccaccctctgacatgcaaacatcttaccaataaatctagagtagttgctacttctcactcactagggccaatcaccataatgtcatcagggtaatacaccattcaataccttgtggaaaagaaatgcaatgaagttccctgcaaacaaaatcatggcataggactggagagatgatagacccttgaggtaggacagcgaaggcgtattgccagccttgccagctgaaagccaactgcttctggtgggtctcatggacaggaaaatggtgtttgccaggtgaacagctgcatgccaggtaccagtagatgtgttcattggctcaaactgatacagcagctgccattggagtcaccagctggttaagcctacaataatccactgtcattttccaagatccatctgtcttctgcacaggccaaacaggagggttgaatggggatgtggtgggaatcaccacacttgtgtctttcaggttcttgatggtggcactaatctctgcaatccctgcagggatgcaatattgttttagatttactattttcctaggtagaggcagttctggtgacttccacttggtgtttccagctatgatggccctcattccatgagtcgaggacccaaatggggattctgccagctgctgtggatatctattccaattatgcatctggaacaaggaaataaccataggatgggtttgagaaccaatggacccactgtaagctggacatgggctaaaactcctttcatcacctgtcctccataagcccctactctgattgaagggccacacagacatttttagtctcctggaatcaatgccagtttagacgcagtgtccagtcatctccaaaaggtctgattcttacctttcccacaatgcacagtcactctggtaaaaggccagaggtccctttcctttgggaaaggatgggagaaaggctaacaggatccattttcaatagtgtcctgggatccttcctcaaggggacccagtcttcccttcactcaaagggttctgggttgtaaactggctcaagcctgggaattgattgaggggcatgagtctccgttttgatgattcaggttaggcctgctcacttgccctagaacttgtctgctcatacaaatcaagtaagggtttagtaggcttcccatctagttcatgtctcaagacaccatgaatagttcatgccatagatccacatgagtcggactattctgatttttgttttatacccactgtccattagagtaaccatgcccaccttgcctttggcagttgagtgcttccacttggcccctgctaccttgggatccatctactcttattgcactgaggtttcccaatttagtgattgcatttctcacgtaaagtctggcctagaccaaagagtaatcacagagctctttacgatgctgaggctcctcttacaaacttatttatcaaagtactggtgaaaagtaagatacactggcccctcccacagtgggtaagcaggtgttaaataacaaatccaccctcacatttcaatcttcctaagtatttgaatccttttctctatgttaaaccaaggcaagtccagcatttccagttcgctggctgtgggtcaccttttgatccatgtttcagccaaccgaccaaactgttagagccctctctaactccctgagctgcaacattcactgcagagtccttgcttaacaagcccatttcaatgaatttggtttgatccaaagttgtgttccttccaccattatccatacctttaatatccatttccacacatgttccctggattcctgtttgtataaattagaaaactcaagtagttcttttggaatgcagcacatttctttatgggtcacactttggacctcacctttaggagcctgttataacttgagtttagttacaggtctagagcaaagggtggtaggatgggtcctcaggggaatcaggattgtttaaaattacctggcagaattgcagagaaaaaaactaaagaggacttctagaagtaaaaagctgaaagttttcgatagctgaagatggaatcagtgacatggaatatagaccagaagaaattattcaaaattcacctaggaagacaaagttgtttttttttttaatatgagaaaaactaagtggtatagaaaatagagtaaaaaaatctaaaatgtgtctgattagttttttggaaagtgatcattgagataatagggcagaatcaatatttaaaataataaatagtcaggaattttccaaaattgataaaagtcagaaagtctgagattattgaagcacaacaaatcccaagcagaaaaaaagaggaacctgtagaaacacatcctagtgaaatttcagaatccctgaagtgaagagaagacctaaaaagcattatgggcctggcgtgatggtgaacacctgtaatcccagctactcaggaggctgaggcacaagaatcacttgaacccaggaggcggaggctacaatgagctgagatcatgccactgcactccatcctgggcaacacggcgatactccatcttaaaataaataaataaatagaaataaaaagcattataaaacaaaagacaacatccagattgaagctagaatatagtggaataaaatatttaaagtcttcaggaaaagtggctgtcaacatagaattttgtttggttgtttgagacagagtctcgctctgtcacccaggctcaagtgcagtggcttgatctcagctcactgcagcctctgcctcctcggttcaaggcattctcctgcctcagcctgcttagtagctgagattacaggtgcctgccaccacgcccggcttatttttgtatttttagtggagacagggtttcaccatattggccaggctggtctcgaactcctgacctccatgatctgcccacctcagcctcccaaatgtttggattacaggcgtgagccaccacaccaggctacatagaattttatatcctgcaaaatatcctttgagagagggaaaatacatttataggcaaaacaaaacagtgttgaccacaacaaaaaaacttctaaaggatattgctcaggaagcaggaaaataatcccaggagaaagtctgacatgcaagagaaaatggtgaaccaataaaatcctgacaatgtgggtaaatctaagctaatatttacagcatagagaaactccagtagtaatatttaacttgtaaaagagcaacaacaaaaacaacacaaagatggaactgaagtattggaaaaccataccatgaaagccagtagtgcgatgaacacaattaaagtgaacacaattaaagccttttaatcattgtattcttctggtggaaaaaagactatatatatatatacatacatatatatatatatatacacacacacacatatatatatatataatatgattagcatccatacccaaataattaaaaaatgggatgagaggagcgagaaggagatgacttaatgaaaccaagcaaaataaagcaaagaagaatgcctaaatctgcaactgctctgccttcccctggatcttccatcagcgcgtctgattccagggccaggtgtgtatgttcaagatgatgagcccatgccccagccccaacttgaccctcttgtcactgttataggcaatggtctggccttgtgggctccagctcatgctcattggttccagcttgtccttgttcttcctcattttataacctccttcccttcccaaatgccatcagatgcaaagataagagccattgagagacctcttagtcagatcccacagtttgacccaaaaggccaaatcctctaagcaatcccttttaaacacacacacacacacacacacacacacacaaacacgcacacaccacatcattatagcaagtggaacacaaaaccaaatgagtgctcagcatggaggaaccttgaggacactatgctcagtgaaatatgccagttacaaaaagacaagtactgtatgattccactgatatgaggtccctagagaagtccaaagtagtcataaagacgcaaagtagaatggcaggtgccaggggctaaggggcgaaggtgaagggttgggagttagtgtttaatgggtagagaatttcagtttgggaagatgagaacattctgaaaatagatggcggtgaaaatagatgattgcatgacagtgtgaatgtacttaatgccactcactgaaaaatggtaaaatcataaattttatgttatgtatattttaccaaaattttagaaatgagttaccattttatacacaccaaactggcaaaaattaaaattgcgcaatattaggtatggccaaaattggggatctgctgggggcagagggaatgagatgagcatataaattgatacaaccactttgaaaaccttttcagcatcatgctgtaatgttgaagatgtgaaaatctttcacccggaaatcccgctgctaagtatgcaccctaaagaaactcttgcaacacaccaaaaaccttcacatgttcagagaagcactatttctactgcaaaacctggagaaaaagaaaacaaatactgataggaaattctgtcagttcctactgacaagaggaaagataaatgtgcagtggtgtgtgcatgtgacacaatgccctccaacaatgaaagatggtgaactaccattgtatccatcacggataactctcagaagcaaagtactaggcaagaaaaccagttgcagatctcatttgcataaagctcataaacaaccaaagctaaattatgtatagttagaaatatatgcctagatactaaatctgtgaaaaagggaaagaaattaataaacataaaattcagtagggtgatttcccctagtgggaatgaatggagattcaatgggcgtgggggtacaaactggggaactgggcaaaatagtattggcaataatctgtttcttaacagacatttgaccaggcatggtggctcacgcctgtaatcgcagcactttgagaggccaaggccggtagattgcctgaggtcaggagttcaagaccagccaggccaacatagtgaaaccccgtttctactaaaaatacaaaaaattagctgggcatggtgatgggtgcctgtaatcccagctacttggaaggctgaggccggagaatcgcttgaacccaggaggtgggagattgcagtgagccgagatcacatcattgcactcccacctgggcaacaagagtgaaactctgcctcaaaaaaaaaaaaagtgacatttgattcatcattaatggattttaaaatgtgtgtacctgaaaaggaataatgcagctattcatgatgtcagcaataaaacaatatttgtcccagtgtttgtcccagtgtctgtactttagttttgatgtgaaccagctctaagattcccacaagtactcgtagtcagaaggcaagacagagaattcacgagttccttgtaaagacagggtgtgtagaatgctatagatggaatgatcagcacttttaagagccaggtgaagcaaatctctggtgtgctgaggacctttggccatgtcctcaagggatgaatgagatcccttgtttagaaaaacataaagactgtcttagtctgtttcgtgctgctgttacagaataccacagactgggtaacttattaacaatagaagtttattaggctcatggttctagaggctgggaagtccaagacgaggggctgcatctggcgagggtctccttgctgcatcataacatggcagaaggcatcacgaggcgagacagcaagagctggaacacatagcctcaaaccctcaagccctctaatcatcattaatccattcctaagagttaagcctcatgacctaaacacctcccattaggccccatctcccaatattgttccatcagggattacgtttccaacacatgcttttagggggacacattcatatcatagcaaagactttcatggctctcttcatacaaccaccaagctttcagcaaattcttcagatgaattccagatgccagttgttcaaacaaggaaaaggttgtttaatatttgttgtttttcatggttgaaccaagttataaggctcagccccaaggctcactgtgtatgctataaaaacaattaccttttactgaatatttgctttgccagtcaccacactcgagtttacattacctcagtgcaagatggacacactgatttcccctttttacagctgagaatgctggggttcagagagggcacttgacttggctgcaccacacagcccctaggagatgggcagctgagttggaatcaggagctggggttcctggggtcaggatttgggaagggaaccctgtttgtggggctgttctgctcccattctgtccccaggggccccaagtcctgcaggctctcttagctccagaacccagagggaggcagttgcagggggaagggtgtttggaagagcatggggagtgcagcagcagctgagggtgagacacctggtctgcttcgtctcctgcttccctgtctgtaggcctccttctcctcccacctcactgctgtcaactccacggggaatcccctgtgtctaggatgggtcaccagctgctgagaagtcctctcactgggtaggcaggtcttctggaggtggctctggggcctctgtcataactctaacaggtccgaacacaggccattcacaatgatggggagacacaggatcattgcaataagaacttcccccgtgaaaaaggtggggaggaggcttatatgtcactctgggtgacagaaaggaatgggggtttgaggcctctggggagcccattctggtctcctccagtcctattaaatcctagtgaatttggcctcctccagtcctgttaaatcctggcgaattctgagccccctacaattgcaaacattgaaaagagcctctgaagtacctgggaaaaaccacgtcttccaggcagaggtgtggcccaccacttcctcacccctgccctagttagtggtgcagggagacatacgccccacaacagagtgcactgtcctctgccttgctgtgtgaaaaactttttttatcatccaggaccaacattttcattacattgttgaatgtcaacatttttagacaacaaatggccacctggtgaagtgcagatgctaatcagatatgagtacctgccgtaccctttaaagcttttaagacatgcagcactagctccaacaataagagtttatgattaaacaaacttcattaaaggtcagcttccagaattacatttcaagctcacatcctgggctttttgaaaaagcaccattttgaatgaaaggctgtatatgtcaaagatgggtgaagtgtcacaaggcttttttaaaaagggcctacaagataagatcagtgccccaaatccttcccagaaaggcagcacctgctttccatggttgaaaaagttattcaaagacccttgttaaagatggaaaggtggactactcaggaccatcgcaataggtccaggcaccatggcaatgggactttctggggtgggagagattgggctccactctaactacagcccaggcaagtggggactgatagcccaggagcagagtggggtccgtggatagaaaatcactaaggggaaacatcaggggtgagggggattctggctaaactgcccttgctgagaacaggctgaggtgatcaaacatcatccgagggatggtggagggtgaggaaccccatcagatatcgagggtggagttctcatcaaactgacttaacagggttctttgctggagctggattttagaaggaagtgcacatatgggccctaagaaaagctcaggagcttgactaaagttccatcaagcagagaatcttttttttttaattttcatttttattttaagttctggggtacctgtgcaggatgtgaagatttgttacataggtaaatgtgtcatggtggtttgccgcacctgtcaatctaccacctaggtattaagcccagcatgcattagctatttatcctgatgctctccctccccacatcccacctcacaacaggccccagtgtgtgttgttcctctccctgtgtccatgtgttctcattgtccagctcccacttataagtgagaacatgcagtatttggttttctcttcctgcatcagtttgctaaggataatggcttccagctccatctatgtccctgcaaaggacatgatcttgttcctttttatggctgcatagtattccatggtgtatatgtgtcacattttctttatccagtctgtcattgatgggcatttgggttgattccatgtctttgctattgtgaatagtgctgcaatgaacgtacacgtgcatgtatctttgttatagaatgactgatattcctttgggtttatacccagtaatgggattgctgggttaaatcaagcagagcatctttgtcatcatctcgtcccttgggagttctccacggcctgggagttccctgcactaggaagggatgaggaaaggcagccaggggctccagtgtggggcagagggagcttggaggagccgcttctccctccccaggacaggagccctggtacctggctctgcctgtggcatggggcagggcagtcccatagcagtggggaggggatggccagggtggaggccaagggagggcaggcaccagcaatctgaacaccctctgttatccacctcggctggggcccattttgaagagggtgtgcaagatttcatctgcaaaatggaggctgctgctttcaaaggtttgaaagtccctgctgtttgaggagaaggcagggatagatgagaccctggaggcatcgcagactcatccaaagagcttagtttgacctcagggcaagggcatcctgcaagggttcaagaggggagtgacttccttcctcaatgtatggatgttgaatgtgcacctctgatttctcctgccccctcccatcttctgcccaccccagccaggtccagagtaggaaggggcacatgcctgtgttctgggggataagacgtcagtgtggttggaagcccaggaaactagttttaaagcttcatttgcatagaaaataatctacctctcctatatttttaacattttactaaaatttgtttctaaatgagtagtacagtttttattatgtgtttcagaacacattacctactgtctgtcaagagaaaataaagtatatctgttgccaaatgcaattttatttccagaaaggtggctctgatagaatggacctcactgaagccctcccctaaggctaggactttgccctcctccactcccacccaacaaagaggagtctcttcaggggtgaagataatcaggatcatattttttttcattgctttgaaaaggagaaaagtgagaaacattattccacttagaataagtttttgaagacctaaaattcaaggttttgttcacaagtctttttttttttttttttttttttttttttttttgagacggagtcttgctctgttgcacaggctggagtgcagtggcgcgatctcagctcactgcaagctccgcctcccaggctcaagccattctcctgcctcagcctcccgagtagctgggactacaggcgcctgccaccacgccaggctaattttttgtatttttagtatagacggggtttcaccgtgttagccaggatggtctcaatctccttgtgatccggccgcctcggcctcccaaagtgctgggattacaggcgtgagccattgcgcccggccgttcacaagtctttataatcataaaataagctttttgatccttgtacatttcttttttccagctaaaatacatgcaagtaactttttaaaaataggttaagccggctgggcgtggtggctcacgcctgtaatcccagcactttgggaggccgaggcaggaggatcacgaggtcaggagatcgagaccatcctggctaacatggtgaaaccccatctctactaaaaatacaaaaaaattagcccggtgtggtggcgggcgcctgtagtcccagctactcgggaggctgaggcaggagaatggcttgaacctgggaggcggagcttgcagtgagccgagattgtgccactgcactccagcctggggaacagagcaagactccgtctcaaaaaaaaataataataataagttaagccaaccgggcaatctcggatgctcccacggtgctcacgcttaaacgcctttgaggctctgggtcactctggggctaccaaagccttgacggccaggcactgcttctgctgctgcacttacccagcccctgccccttccatctcctcccagtcccaaaaccccgctgcccagtcagagagtccacttagggaactgcacctgttttctgtttgttttgttttttcctgaaaatggctggcccaaaggaaggctcataaaacccttgaatctctgtgtttgcagagaaacaaatatgaagtgtagctaaagagggactgagcaaagggtccgtgaaacacgcagatccatagggatgggggcgacaagcttccgtgctgaacaggagcgaccctggggtggctgcccgtcgcagatggctaggtcactcctctttcatttcttcagggacaaagaagcactacactgtgagcctgctgttatcactcccaacatctggtcaggaagcaaaccaactgatcaaggagcaacatagttcatcctacttgagcacctctacttccagattttgggatatgtaacatgctgagaacaagttaattatctatgcacatatatgtgtatgtgtgtatgcatgtgtatacacatacgtgtacaaacaggcatatatacagtatgtatacataaatataaatatagttaaatatatatttatatttataaatatatagttaaagattcaaatacacaagtgcccatttttcccattggtttttggaaactgtagctgctttagccaatctgtcctttaagaaacaagaacttcggccaggtgcagtggctcaggcctgtaatcctaacacttatggggggccaaagtgggttgatcacttgaggtcaggagcttgagaccagcctggccaacatggtgacaccctgtctactaaaaatacaaaaattagccaagcatggtggtacacacctgtaatcccagctactcgggaggctgagggaggagaatccttaaaccttgcaggcagaggttgcagtgagcagagattgcgccactgcactccagcctgggtgacagagtgagactctgtctcaaaaaaaaaaaaaacaaaaccagaaatgaaagcttaaaccacctgtgcctcacaccgcaaacagctccctgtgtaattaaggagagactttgctcttccaccgtttccattcacgtgactggcaaagtcgttccaggagactccagccccagtaaatggaatggggcaaatttctcatggaaacctccagaaagacccatcagctcttcaatggaaagcagcaactttgtgctctaagattctttgaatctctcacttaaaccccttgcctggctgtttccaccaagcttgggctggtgcaacatggtccacactcactcctcatcaacccctcgacccctcgacccctcgacagggaatgttccactttatcccaactccaatcttcagggggttccaaccttgccctcctgcctcccaggcactgcgtggcttccgttatcaccgtgactaataagctcattttgtgttggtgtgttagggatctggagagcctatatctgccaataaccaatgtcatatgtaaatatacagtgataaactactcaataaaactaacaaagaaaataaaactggctatgttcctggttgtaaaagtcttccaatcatgggaacaaaatgtctgctgtaaaatagtaaagaattctactataaaaagaaagcggggcgtggggaaggtacttccttctttacctactctgtccttcaaaaatcacctgcaaccccttaggctaatggcagtttgaaaattgttttaatatctgagatcctaaaaaaatggtcaagaatttcaagattcctgcacaagtttgagttagagcttttagatgatgaggtcgtcacaggtgacaggaggtcacaggcgacaggaggtcacaggcatgtgtgtagtgattatgctcgcctcctgggtgtcacccagccccgtgtgtgagatgcacgtggaaggcgaaagcacctgtgctcagcgcctgtgagctggctcagccaggcctttaactgctcgctggaacactgattcctggtcaccccaggcagcacactgggagggactggagcttacccccagggtggactgtaggtgctggggtaggggtgaggatacccacctgcccaaaggataaggaagatgcaccaaatcatgcagggtggagcgtatcagctccagggaccccttaggtcagagcacagatttgcctttcacggtacctgtaactacttctgtaatctcatacacagattgctcagcttccctgagaattagttgctttatccataaaataggcataataacgtattgctgggtcatgaagaattaaattaaccaatgaatagagagagacttgtggactacaaagagctgggcaaatacaaggtatattttccaagaagtagataattcaggtaacttgcaaagcagcctagggctggactgggctggacagagacacccatacctagggttgccatgtgtagttgttcaggttgtatacggtacaaacgtagggatgactttcacatttgtagtcatgaaggatatgtatatttaacatgacattttcctgcggatgccttaaaatgtcttatggaaaggatgatgtattcatattcataagaaaacgttgaacaaactcatggtgaggttatctgtccatgccctattttgtaagatgaaagaaattaaaccttaaggctgaactctcttctacgtgggttgcaacactgaatcacagttttgtatcttaattgttctttgacttacatatacagctggagggcagaaataaaagcatcagcttttaaaaatgcatcaatcaactttagattgatccagaacaaagctgtcagttgattgtagtgggccaaaccaggtacgatgtgtcttactagaaacacagaagtttacaaacatttgaactgacatcttaaaactaggagacttcacataaaattcagctttccagcttctctttaaaacatggaagacctggctcactgggccaccttttagaggagcaggaaggagctcctcagccctgcgggcatctgagtggcagccctgcaggcaactgaaattccactgtcctaagctgttccaggaggcgctggggtccggtcaacccccgaagcccagcagcgagctccagagaccccgtctccccacagaatggaggtcagaagctgccgccaagcacatgaaacatcttggcttccctctgtgcactctctccgcttcctaacttccctagcttagaaacaatgaggaaaacgctgggcgcagtggctcacgcctgtaatcccagcactttgggaggccgaggttggtggatcacctgagatcaggagttcgagaccagcctggccaacatggtgaaaccccatctctactaaaaatacaaaaattatctggttgtggtggtgggcgcttgtaatcccagctgctcgggaggctgaggcaggagaatcacttgaacccgggaggcagaagttgcagtgagccgagatcataccattgcactccagcctgggtgatggagagagactctgtctcaaaaaaaaagaaaaagaaaaagaaaagaaacaatgaggaaaacgatggaggccccacacctgcaccccctgcatctgctctgcaggatggctgcacacatttactgcccacctgtgctgggaagttcaaagagagcagaacatgcagcttcctgaagcttgtgtcccagcagggaaggcacaaactaacacataatgaatgtgcagtgccagtgccaaaaaaaaaaaaaaatgtaaagccaggataagaggccagcctgaccatcgaaggggctccatctccggcaggagtctgggagggtgtccatacgcaggagaagcagcaggtgcctctgctgggggaggagccttcatgagggcagtgagagtgcattatggaaggccctgaacactgcaggaaggattcagaattgtattctggatggctgggaccagagaaatcacataccctggttaacacttcagaagaaacagtctgctctttgctgtgttacattttttttttagtagagatggggtttcaccatgttggccaggctggtcttgaacacctgaccttaagtgatccgcccaccttggccttccaaagtgctgggattacaggcgtgagccaccgcacccggcctatctgctgtgttacaaacgacgtgccaggagcagtgccaaggaggggagatcctagaagaaggcttgtacaatagtgctcaagacatcctagagcggggagtgggaatggaggactagcaaatggaatgtggggactgaggggaactgggcagtcagaggtgaccccagggattttagtctgaacagctgaaggaatggagccgccactgacggagatggggaaagcggatgtgcaagatgacatcaagaacttggccttggacacgttcaacttgaggtgctaattaaactgggaagagcaggtggtggcaggcagttggagttgaggggatggagatgtgaacttggggggcgccagcagggaagtgctacttggagccggggcccagaggagctccccagggagggagggtcagccggtggacagagctctggggctgcctgtgagaggcagaatggggggattccaggaaagatatgaatgagcaagaagctgtgaaaacaatttctgtccacctgaaaaatgtacacggcacagacgtggaaggaaaggaatgaggatgatattaaagtattaaaatcccacgtacttgagacagtaacgataaataaaaataaacccagtgttgccagggatgtgagaaataaaagcattattttgttgccagaggggcactgaaaatagatttaatgtagtcgagagcaggcaccaactatgcggcaggagttacgaaactctgtccccagaaatattctctaagtggggaggtggcaagttcaaaaagaaacaaatgataacagccttctcaaagctctgaaagcagcgctctcacactgggcaaaggcggacctcacctcaatgccctgtagcaggggacccctaagcacgcagaggctgggtctcactcagcaggtgggtgtctcagtccgcaggtgcagcggagccagtggcctttggtcctacagctcagcagaactctgactcccagctcccatgccacccaggtggccaaggaaaagctggaaagatgcacgggtcactctctccagctcccacctccttctcctgagaaataaaatccacagccagctccagtctgcctgagggagagaaaagggaaaaacaaaagaaaaatacataaattaatatccaaaaataactgggcacatacaaaaccactactaatgtcacagcataggaccagacaggatcataggccatgatcttgcctatagcatgagattaagcaaaataatagaattaataataataataaagtatttgttgttctagatgaagtgactgacaaggctgttgccccaaaagttgaaagtaatgacataattactttctgacaataaaactgcaaaggcagctcacacaggatcagagcataggtattcaaggtcatgtttaaaagataaaaatagcttaatgccagtgagatcttatcttcatgaatcaaaagtacggcatacaactaaacatacaaacaaaaacagaagaatgtgccactaacgagcagggttggctggccacaggagtttacaaaatgccatcacggggatcagtgctagtcgggcctgctgtcagtgagggaaaggggacccagatgggaagcaggggtctcctggccagggaggctgtgattagagacagaagcacctcatataagggacagaatgctcaaggttctggtcagaacaatcacatgtgtgtgtgtatgcgtgtgcgtgtgtgtgtgtgtatgtgtgtgtgttgggggtgtataggtaatatctccagtgattctcaaatgtcattccatataagagttattgagaaagccagactttttaaaaaaaaatgcaaatttccaggccttacctccaacggggcaggtgttcttgggggttgaggtgaagctaaggtcggtggtccagaccccacttgctcccctcccagtggtctctgggcttggggaccgtgagactgtcctctttttgcctctggtgggctgagaagtcagatctcagcctggaagagtgagaagcagctctgcattgtgacttctagggggcatcccctgttgtctatgacagccttacctagggggtgggcccaggccacccctccctacacacccagccctaggtgcctctgcctgaaggtcacccgctgtgagatggtctgtgagccccctgtaccctcttcttttgcttccattgttgataaatacataaaaacacagccatgtgtcaacaaaaaaagtgaaacgctataaaatatttgaagaattttattctgagccaaatctgagtgaccatggcccatgacacagccctcaggaggtcctgagaacatatgtccaaggtggttggggtgcagtctggttttatacattttagggaggcatgagacatcaatcaaatgcatttaagaaatacattggtttggtctagaaaggcaggacaactcaaaattgggggggtgggggatgggtggagtgtgcttccaggctataggtgaatttacacttctttttttttttttgagacggagttttgctcttgttgcccaggctggagtgcaatggcatgatctcagctcacggcaacctccacctcccagggtcaagcgattctcctgcctcagcctcccatgtagctgggattacaggcatgcaccaccacgccgggctaattttgtgtttttagtagagatggggtttctccatgttggtcaggctggtctcaaactcctgacctcaggtgatccgcccaccttggcctccaaaagtgctgagattacaggtgtgagccactgcgcctggccaaattaaacattttctggttgacaactggttgtgtttgtctaaagacctgggatccatagaaaggaaatgctcaggttaagataaaagactgtggagaccagggttcttccaaagtctcacagtggctgcccttagagacaatcaatgacaaatgcttcctgttcagacctttaaaaggtgctaggctcttaatcttttcaggattgtgagggcctggaagaaacaagatctagctgtgttaatagagattctttacagacgcaaattttttcccacaagggacatctttgcagggcatttcaaaatatggccaagaaacacgtttcagggtaaaatactttgattttcttatttgtcacataatgttatgccagagtcagattggaaagtcagtcacgatatatagggttaaataaaacccatctgacgaaaatttatggtttgtaggaaatgacttcccagaccccttagataggaatttgggcaagataaaaaatcagagtttagtccttagttcaccaaagatgaagagtttataatttaatggtacatttcctttcttaagtcatctgagttagattggctgtaaaaataaccttacaccactggctattggctccttctcttcttagacctggacacagtgcccgatgtccaaggctgaaaaggtttagaaacaggactttaaggtaagacagggattccagtgacagctactgagtccgctgaaatgcagggaggggtcctgggcttctcagaaccccacctagatttggaaggaacctctctgaggggtgcacatccatggacaaactcccggggcgcctggggactgacttcccccagacacatctgtctttctctcctgctgttgctaggaagctgtaggcatcccggagtctaggccctgccactcttaatccagaggtgaaaaataaagagggtgtccatgctgccaccggggaagaaagtcttggtcatttcctcagtatcttctctaccatcagggaaaaaatatcacctctttcattaggaaagaccctggaatctgcctctgcttctaaacattacggtttattttattttattttatttttgcatagtgcatgcacccagagcttactgtcttcctggatttctgttttgttttgtttttgttttttttgtttttgagacagagtctcactctgtcggccaggctaccgtgtaatggcactatctcagctcgctacagccttcatctcccgggctcaagcaattctcctgcctcagcctcctgaatagctggaattacaggtgtgtgccaccatgtccggctaatgtttgtatttttagtggagatggggtttcgccatgttgaccaggctggtctcgaactcctaactcaggtgatccacccagctcggtctcccacagtgctgggattacaggcaggagccactgcacttggcccttcctggatttcttgtattacttttaataataataatttaaaaaaacacaggaaaagaaacgatgtattccagccctgtcctttgcttcatggctgttacactgacactgtgattgtaagcttgaatttcgggtcgtaggcaattttctgacaaagccccccacttctccctcagccactgcccctgcaccgccctcagcatgaagcttaaaagggagagaatatagatcccaccccaagggcaaagagtcaacgggtccacatccacaagtcctgagcactcttgcatttatttcacaagtcagtgaaagccaatgggatgtccctttccgatgctgcatgggagcaatgagaagcagccagagaggcatcacctgaccaggcggctggctggcataggggggtggctgtggccagctggagggggctgctgggcatggtgggggtgaggggcagaggacagcacctgaaggatgcttggagaagggatggggagcagaatccatcagggcgctcccagctcagtagcagggactgtgctggctgctggggtataaggtagtaggagagcagggagaaatgcagtcagtgaccaggaggatttctggtaatcaacgccacagttctttacttgggagacagttttgttggggataaaagctcctggagtccagacactataacccccttgacacctcttgattccaggaattcactctgtgcttgggacgattatgtgctctataaagagggactggctgaccagtgtgttctgctcaagttggttacaacattgattttgacatcagacaagtggtcttaacccttagaaccgtcattcctgagatgtgtagtctagaaaagttgcttaaattccctaagcctcagttacctcatccatgagatgggacaaagactgtgtatgctgtaggttgattgaaaagacgaaagccacgaggtacctaaggcaccagcatggtgctcactggattctgaggaagcacagcctctccttgtcatacttgggcagcatctgacaatggtcaaaattctttcacgtgtgtttttcagaccccaggtcaaccccaagataaagagacaaagaaaaagtgtttctacttttagagaatacccgtgatgatagcttgatgtaaaaccaaggggtgggagagaatggaaccagctggaggaattaaaatgccaagggccaggacttaggaaagaagcctgtggctcgatcctgagcatttctgtctgttttttttccctaaacctttgtgtttttttagagacagagtcttgctctgtccacccaggctagatgcagtggagcgatcatagctcactgcagcctcgaactcctgggcttaagtgatcctcccacctcagcctcctgagtagctgggactatgggcacgcaccaccacacccagctaggttttttaaaattattttttgtagagacagggtcttgctatgttcctcaggctgttcttgaactcctgggctcaaacaatcctcctgcctcagcttcccaaagtgctgggattacaggtgtgagccactgcacccagccctgtttctaaattttaaactcattggccagacacggtggctcacgcctataatcccagcactttgggaggccaaggtgggtggatcacttgaggtcagaagatcaagaaaagcctggccaacatggtaaaaccctgtctctactaaaaattcaaaaattagccagacgtggtggagtatgcctgtaattccagctactcaggaggctgaggcaggagaatcacttgagcccaggttgcagaggttgcagtgagccgagatcatgccatcgcactccagcctgggcgacagagactctctcaaaaataaataaataaataaatgttttaaactcataatttcacccatggcatcgatgatggagacatgaagctggacccccacccagccatagcttgatctgtatatggaaaatgccttccctgtcctgaaattcaataaagagaaaatgacagaagaaccacatgcactactgtttttacaaatcctagagtcatgtaacttccttaagaaagacattattagctgagtaccattttatcgggaggagctgggagtgtgagtggatttcatggtgccacatcagctctggttttgtggcaatcgataaaagacacccagagcagcaggagcaaagccatagaagggagagtttatggtcaatatttttgatatgtagaacctgtgatacctactgtaaaaagtaattacaataaatattctaatttaaaattttcatcattcataatagaactgtaatcaaataggtttgattttaagtgatgtgtcataggtccagtattttgataaatacttcctgaatattctctcattccatccttggaataacactgggaggaggggttagtagccctgttttccagaggaagcacagggtctgagcttgttgttcaatgttgcctggtatttgggagctgggctggatttggagaggagagggggacggggctgtgtctaccttcagtatagtcaggctggacactgtgtagccagggacggtgcagtcaagatgggtagggatgcggagaagtcaccagccaggacagtgccaccctgagtgggtgccagcagacttgtgcctgggcatgaaccctaggggcgatccatctgcacccagacaacccagcatggtggtgggggaggtttcccaaaactccagctttatttttgggtccagaaggaagcactggccaggggtaaggttgttggaagagcattccctgttccacgtgggagttgggttggtagccaggggcaagctgagaagctgggagagctggcaggaacagcgaggaagtggcaggacagagacggaagtgagtcctgacctgtcctctgcccatgcctgcatgctgtgcatccactgccctgggagtcgaggtgatggccccgtactggccccaggatccgcttctgtcattctaccagctgggattgcaatgatttgtccacttgttgaacgattcagcgttttttttttctgctacttttctcactacctgcatctgaaaatacttctcttccctggtcagcctgcggtcaccccgggggattggcttgctggtttttccagttggaccagatgcacccatcggagctgcatcagcctctgggcctggaggagagaatgtttccttaggcacatcttggctgccaccagaaatgtcagcctcgccgggcgttatatggactcatgtgcacatccaggcagggtccagagcccaggatgtttgcattcaggctccaggcccccagtttccagcgagatggctgtctgccagccaccgagccctcggcctcagcctcacctctgtaacgtggggatttggtgatctgcccaaccagtggccacgtgaaataatagatctgagaatgctttgaagagagaaggaagcaccaaagtagtccacagctggctgggtgggccggggtttctctggtctcggctcattccggctcattctctgtgtcaacactggcaagacgcacccactctgcacaaactctgggcgctcagtgctgctggagggaggatgcggcatatttgcaagaagcctacaaggggcccatgctagttttgtagaggatgaagtttatacaatgtgggggaacttccctaaggaatagtatacaaaattataaatacaagagcagatccaaagcagattatattggtttaaaatgagaaatgaaaatataatggattacaaattctaaaaagctaacagtatcataatatcacaaatccacaaaaataatataattttattaattttataattccttttaaattacagctttgaggtgcatactctttgcttacttcttaggacaataactataaaaatagcattcctgctgagcacttggaaggatacttcagccttctcttgacatggtagcttctggctctggaattctaaaacccccttctctactccgtttcccgaaaacttaaagtgctgggcaccatggggcatactgtacctctacggtggggagacacctggccctgcactttgccacccagcagtcactgtgtgtgttacgtgtattcctggaagccattcccacggctcagagttaaccacaaattacctgcacatgactgctgacaacataagaactactcactggtcccaactttggtgcacctcccactcccttagcactgctccagtatgcctgaccactgcactacggccaggacacccagagaggagagagagcatgaacagaaacagacagcgatcctcaggattgccacgaaaatagcttactcttgcaatgttcgcaaaatgccacagccatgcagctttctcccaggacttctaggctccagctttccaggaaatctcccatttgagctcaacaggaaagttctggaaccaacctagcttctctgtagtgcttgggaggtctgaacccactgttctcaagccagtgagacccgggcgggccctttacctggacttctccaacctggacccctgcaaacccgtctgtctctgcttctgcaggtgaagcgggaggaggagaccaaggccagcgcagcccacccgccctgcaccagtgcacggtccccaccctttctcttcctttccgtgtctttacttgtcagccacctcatttgattagttcagaagaggcacaggtagctcattgcctttctctccttattagtgaagagatagcacttggtgtttctagtccaggaagcatggaggagccatccccgagcagacaggggtaaattggtggtgaaatgatcactggggttcagacaagttagatctgatatgaattctggatccccaaagggagacaccaaggaggcaactgaatatccgagtctggagttgcagagaggcccgggctgggggcaggaacacaggagtctttcccatgtgggtatcaagacaatctttaatgccgtaatgctggctgggatctcccaggaaatgaagctggagacaagagccccatgcagttccctggggcacagcagaaagctctaaggagggacaggaggaaaacaaggtgaaggaggtgcttgggctaaattgtggcccccaaaatccatatgttgaagtcctaacccccgtacctcagaatgtgaccttatttggaaacagggtctttgtggaggtgattgagttcgaatgacggcattagggtgggcctggtccgatctgactatgtcctgtaagacgaggagatgaggacacagatgcacacagagggatgaccctgtgaggacacagggaggagatgccatctgcaagccgaggagagaggattcagaggaaccagccctgccaataacttcatcttggattttcagcctccaggactttgaaccaataaatgtacgttgaagctccccacctgtgggatttgttattgccgctccatacaggtgggggcctgggaacctggactcatacaggtcggggcctgggaacttgggaaaatcgtgcatcgcagagtggggcccaggaggccactgctgctgggggtcaagtgagagtaaggctgggaatgtccctccttccccatgagcgttctgaattgttttctgataataacggaacagatatgtttggaaatagtttaaaatctggtactgtgactggtgcttcacatatttgtttgtctcaaaacacacagataggtaatctatataaagagaaaacaagaagacacagactggaaaacagatctggttgttaccaaggcatttagcatgcaatttctcatttgctgtggacacgacgagaagagaattcctcactcggttttctgtctgccaccttgctagcgatcagcccactgggaacattttattaaccccttattaaacttttattagttttacttccattgcctagataatcactgtccaatgaacacaatgcaagctagaaaaaaaaacaaactactgaaaatccagatggacaccttttgtgggggcagaaatggaacagaaacgcttagcagcagcagcgagggacattgcagccaccagctgaagaagggctcctgccccaggggtccggcgtggtttgggtctaggggtcatggggccaagagggcatccagagagacaaggagtcagggtcagaatcagactctgggagtgcaggttgaaatgagactgctgcagacctccctcctgaaatgtttgtagcaaactggtccccagcaggcctggggacaagaaggtgtctcagcaggatgggaaaaactgagatgctgggccagggacactccgctgacttctaggcaggggttgcaaatgtcacggtgagacctggtcctggacggagaccagcaggcaggaggaggcagtcacggaaatccacagagagaaaagaaattgcataaggagatggcactcctcaaatggggtggggcaccacaactccagaacaaatgccaatgcagggcacagatgagaaaagccatcattagaatatgcatcttagctgggtgtggtggcacgcacctgtagtcccagctactcgggaggctgaggcaggagaatcgcttgaacccaggaggcagaggttgcagtgagccgagatcgcgccacttcactcccgcctggcaacgagtgagactccatctcaataaataaataagtaaataattgagatgggttctcactatattgcctaggctggatcccaaccccttggctcaagggatcctcctgcctcaatacaaataccaatttttgtatttgtagtagagacagggtttcaccatgttggccaggatggtctccatctcttgacctcgtgatctgcccaccttggcctcccaaagtgctgggattacaggcttgagccactgcacctggccaatttgttatttttttatagaaatgaggtctcactatgttgcccaggctagtctcaaacccttaggctcaagcagtcctcacacttcagcctcccaaagtgcagggattacaggcatgagccaccatgcttgacttcaattaaaaaaaaataggcattctttccaggaaaattaattttacagaaaatctgacatagactttaaaataggtatgtgaagtccgctcacagagataacttcaatttctctgtttggatttcatgatgccccggagtatcttttatgcataggaaagacgatttgcaatgactttttaaaaaaatatatttgatgtttcaacagctacaaattttaaaacatggtttttccttaggctttcatgtttaattcctcttgttctacttagaaatctggagaattttgataattactcagaaaaggggctttacaatttttgtttattaaatgttctcaaatgttttgaattgcatttatcatttttaaatatttttagtttcattttaagtacttcagttgtctaacaaaactttttcaagtacatgtgtaattttaatagcattcatttataaatgtggttatttgtaagctgtcttaaatagtttagtattgtttcaagaaacagaagaggtctgttttcagcttgatagcaaagatctaaattaatgcctcaaaaacacactaggttgcaatcacaagtccaatttgctatattctcaagtaatccaaactgtctgaaatattacaaacattttaaacccctaatttacacaggttattccttaacttaattttttaagtgttggttctcttgttttttcattgtctttgttggggatttgataaaattcaccctttttggggcctgcagcttgtacaatttcggggctctctttaagagaaagaacacacattcatgactatgaagcgagctccagggactccaaaggggcacacgctgttaaagggcctgaagcttcaacttcattgatttcatggtaaattcaactacaatttctatgtttcttcaaagactttcccggggttaaaaatcacttacctatcaagtaaaacaatttcatattcaaagcaagcggtggtgatccacccaggccacgttgtcactgtcctcacagtccatcagtgagggctctcactctgtctgtgacacccaaggggcctccaagtgctaaccacctgaaacaaaccgaggtctgatgagggatgctgcagtgattcttcagaacattatggacggtggggaaatcccaagaccaccagagggagcagatggattcaggaacaaacgttagcagtcagcgaacttggatcaccagaagcagacaccggaaagaggaagagcttcaaagcactgagcaaaaaaacccacccagtggaatcttatacccagcaatagttgattcaagagtggagtggaaataaaagtattttcagataataaaaaattagtcgttttcccacttactgtctcccattaaagggatattaatataagtcgttgagtaagaagcaaattgaaactaggaagggctgatcgcagtggctcaggcctgtaatcccagcactctgggtggccgaggtaggcagatcacctgagatcaggagttcgagaccagcctggccaacatggcgaaaccctgtctctactaaaaatacaaaattagctgggcgttgtggtgcatgcccgtaatcccagctactcaggaggctgaggcaggagaatcgcttgaacctcagaggtggaggttgcagtgagtggagatcacgccactgcactccagcccaggcgagagagcaagacttcgtctcaaaaaaaaaaaaaaaaaaaaaaaagagagagaaagaaagaaagctaggaaaagaccagtgattgaagaaatgaaggtaaacatagaaatggataaaataatgggaaattaaatttcctcttggcagaaagagtggtaggcagaaaaatggcccccaaaagacacccaggtcctaaatcccaaaacctgtgagtatgttcccttacttagcaaaaagcactttgcaaatgtgattaaggttaagaattttgagacaggagactattctggggttttcaggtgagtctaacataatcagaaattaacctttccagggtcaggagaagagaggtgtgactacggaagaatggtcagagacacacgatgcggctggctttgaggaaagaggatggggcagcctgtagaagatggaaaagacaaggaaacagagtcccctttggaatctctggaaagaaacgtaaccccattggcatcttggtttgggcccagcaagacccatgtcagacttctggcctgcaacactacaagataataagtctgtattgtttagctcactccatctgtagtaatttattgcagaagcaataggaaaaacaaaactaatacatccactcacccgcccaatccccaccccccacgcacacctatttagtgtgttaagaatggttaaacccaagcggcaggggacagtagcagtaggagtccgcagaggcatggctaagagtggttaaacctaagcggcaggggacagcagcagtaggagtccgcagaggcatggctaagagtgtcagagtgtctccttgagaaggagaatagaaatgctgattttcttaatcttttctctttttttttttttttttttttttttgagatggagtttcgcttttgttgcccaggccggagtgcagtggcgcaatcttggcccactgcaaccttcacctcccaggttcaagcgattctcctgcctcagcctcccgagtagctgggattacaggtgtgtgccaccatgcctggctaatttttgtatttttagtagagatggggttcaccatgttggccaggctggtctcaaactcctgacctcagctgatctgcccgccttggcctcccaaagtgccaggattacaggcgtgagccaccatacccagccagattttcttaatagtttaaagaaaatttgtggtgacttaagcatattaaagaaggaccatctcaaaaggaattgaaacttataaagctccaaagcaggagaagggagaaaagggaatgcaaaaattttattacttcaacagaaagtagaagaggagagaaaaagggaatgaagaaaaaattcagtcagaaatcaaaaggtgaactagaggaatcccaaatatattagcaaccacaaaaaaatgtaaatcacatacaaaagatgggaatgatcagattgaatagaaaaacaaaatccagccatatgctgtttaaaagatgtaagcccaggtaatgtgtttgtgaacaataacctaaagaaatatgctgtagtcatatgaaaattagacaaataaaattccagggctcagaatatgctgccccagaataggacaccctggcacactgagtattttaaggtgaaggaaactgagaatctcgcagaagcagggagttcgctctctgagcttcctccttccttctctcctggaataggtcataagaccctcatcccagaggagtcctcctctacccggaagaaaggaaggaagacacagagatgccaagaagaatctgaacaaacaggtctggctaagctcccttaaccttcattaaacgtatgtaaaaacttcataaaccttcactgtattaccattagatcaaagcccgtttgtccactgtcatacttttccacaactgtttatagaaatacacagtttcagccaggcatggtgcctcacacttgtagtcccagcactttgggaggatgaggcaggaggattgcttgagccccggagtttgaaactagcctgggcgatatagtgaaatcctgtctctacaggaaaaaaaaaaaaaaaaaaaagctgggtgtgctggtgcatgcctgtggtcctagctactgggcaagctgaggtggatcacttgagccccagcatttgaggctgaggctgcagtgggctatgatggcaccaatgcactccagcctgagcgacagtgcaagacatcgtctctaaacaaaacaaaacaaaaaatacaccatttccctgcttctgtgggtctttatttctgaaggctctcgtgtgacataaacctgacactaaataattttgtatgcttttctcttcttacatctgtctttcgttataggggtttgggccgtgaacctagcgatgggtgagaaaaatatattactttttctcccctattagattttaaaggaaaaggcataagcagggataaagaactccatataagaataaaatggcaatctacgatcttttaaaggatacatgtaacatatattaaaattgattacataacatgttacaaagtatgtaagtactttgtaaggaaacaattaatagagttccctatacaagctagtaaatgtaatagaaacctacaaaacaataaagagaatcaatcaaactggttcttaaaatgaacaaaaagcataaaatagataatttcccatcaagactgaccaaagaaacaagaggaaaggcacaaactacgtaagaataatagggaagataaaaagagagattaaacattttaacaaaatatatacatgactttatatttgtacattttaaaacttgcacaaaatgtgtacacttctaaaaaaaaaaccaaatcgccagaattaactcaagaagaaagtaaaagcctgagtaaatcaatgcaaccactaaagaaattgaatctgcatcaaatacctccttacagcctaaaaagatactaagcccaaatttacagaattttttttcttttatcaagaattcaaagaacgcttatcttatgcaaacagttacatagactagaaaagaaagttgaagcattttgggtctgaacaccaaaaccaaatgaaagcagtgtaagttagatactaatttcaattatgaacttagatgcaaatattttatttacatacataaataaaatatcagcaaactagatccagcagtatatatttaaaaaacttaagaccaagtaggatttatcatagcaatgcaaaagtctattaattttataaactatctttacagatgctctctattgccagttctagtcaatattgtgctagattctagcaagcaagcaagcaagcaagcaagaaagaaaagaaactggagggaaggaagaaagggaggcagggaggaagggaaaggagggaaggaaggaaggaagggaaagaaagaaagagaaggaagaaaggagagagagagggagggagggaaaaaagaaagaaggaaagaaagagagagagagaaaaagaaagaaagaggaaagaaagaaagaaaagggaaagaaaggaaagaaaagaaagaaaaaagaaagaaagggaaagaaaggaaaggaaagaaaaaagaaagaaagagaaaaactggaggagaggaaggaagggagggagggagggagggaaaggagggaaggaagggaaagaaagaaggaaggaaggagagagagagggaaagaaaaggaaaggaaagaaagaagaaaaagaaaaagaaagaaaggaaggaaggaaaagaaaggaaaggaaaggaaaggaaaggaaaggaggaaggaagggttaaatcaagtttagcctcaagctgctccttacgtattttaagttcagcccaaaggtttctctgtacctggtgactataacctaaatggagttgtaagcagaccatagcctactctagtgccagtcactgagttttggccgatcaaaggtggccaactgttcgaaccatgttcaaataaggcaaatgccgagctgtaaccaaggtggctatttctgtacctcgcttctgttttctgtatgtcactttccttttcctgtccttaaattgtcttccaccacttggctgtgccggagtctccgagcctactctggcttgggaggctgccccatttgcaagctcaattaaactttgctcaattaaactctgttaactttagtggctaaggttttttttttttagaagaaaggaaaggaggaaggaattagaaaggaatacgaaaagctgtcattatatgcagtagatataactggctactagaaaatgcaagagaatgtacaactactagcactaacaagagagtctagcaaggttttggatacacaaccagcatataaaaattagcagcaggtgtttacaccccacaatgtaatccaaaaaaggattccatataattgcagcaaaaattatttgatccctaaatctaacaaaaaatctgcaagagaaaacttaaagctgatttaaataaaaacataccacgctaataaacagaaagactcaatatcataatgatgtcaattctgttctttccaaatgaatctgcaaatgcaatgccattttgagcaaagtttctaagggctttccaagtgtcttgccaagctgattataaaattcatatgaaaattagaagtccaagagttttaaagagggaaaattcatcttcctaggtatcataattcatcataaatacataaattaaaacagtatggaactgttcagagaacaacagacagaccaatggcataaaacagaaatccaagaaacagactttcaattggtggcaaattggtcctgaggccaggtagcgtgacaaaacagtgggggaatatttggtaaatgctactgaggcccagctttgtgaggcagggggttttgagagtggggaataccaaactggcctgaggcagaggaaagctgacttgctttctacctggcccccatccccaacactcccgagcctggggaccacttctattctagagcgacagatttgctctataaaaacagttgcagttagaactgggccatgctgggaggctgctggcagggaggctggcaagaactcagggctgggtagaggctcttgggggtgcacagacaggagacacctgtctccttttctggggtgccaggagtcctggccggtgatggacaggaataagcagaggccctgagagtggcagctgacttattttggcatgggtgcacagttgctgagctgtttcctctgtgggtggcccagctcccaacctgagacctatctgagcatccattgtagcctaggttctgctcttacctaaggaatccttacagccttcaaggtttgtggaatctctattttatagaaagcagcaaaggtgctcaaagaggctaagtaactggcttttttttttttttaatggagtcttgttctgtcacccaggctggagtgcaagggcacgatctggcctcactacaacctccacttccccggttcaaagggattctcccacctcagcctcccaagtagctgggactacaggtgcgcaccattatgcccagctaatttttatattttttgtagagccagaattttgccgtgttggccgggctggtctcgaacttctagcctcaagtgatccacccgccttggtctcgctaatgctgggattacaggtgtgattcaacatgcctggccccacatgctttttaaagcagcttggctgggatttgaatgcatgagtttctgacaacacaggtcaagaaacatctcccaccataccctctttaagaggccaccagcacttctgttagaagttgcagcagagaaaggatcctttaggcacatctcccagatccttgcgaagaggggcaaagggaacttggaggaggccaagctcctgggagaagaactgtatctaaatgcagatgtcctattgttgccgtcagagaagacacacccgaagctgagacagggctctcccagaagtgaaggaagatttcttagtaaaagtttgcaggtggggctggaaagataggcttctgaaatagggggcttctaacatccttgggtgagcccctaaagcaggtgggggcggggagagggtacttgcagtgagtgaggatagttttaaggtaatcaatagttagatcttcattttacaaatgggcctcccaacccaaagcaccctgccagagaggcatctgaggacacagcccccctccacttccacctcctgacctcacccagctccccctccccaaaagcgggaggaggtgattggggtgtggagacagcaagcaccccatgactaggtattgatcctgcaaaccagaaagtttccagttcttggctttaagcagggcagatgaaagccctacattcgttgccccctgagagaccattaaaatcacattgatcgttactgaccataggacccacgaatcctccccatcccataaggcaggcattgccagatgacagatggggaaactgaggcacaggaggctgtaatagcctgcctgaggttgcacacctagtaaatgatggagcagggctgggaacttaaaagtgtggctttcatcgtgaattctggggtgtaacctgggaggacttcacagagtgagtaggatgactgcaaagtccccgtgttcccatccacttgtccaaggcaagcttgtttcctcagcacttacactgatacatcagagaacagaggccaaattggtgctgagctgtctcattcacgcacggatgcataaacaaaatgggaacctcagaacagcctgtggactggatttctgcccctgccatgcacggatgctcagcctgtcaactggatttctacccctgcacgtcggtaagtagctggctgtgctcaggctgtgcccagctggcacccagccccatggagctcggggagtgtctccaaagggggaagggaatattggaatttatggtcaatttgaagggtggcctgaggcaggacattcactgcctggcaggtgaaggcggacataattagaacttggctagggccttcagaggattggtgggaaaagtcagaagaggattttgaagcgaggtgtttggaagaatcttagcgttgtccattgatatcttccactgcagtgttgacgggtctttcagggagttactgtaatcaaaccatttgtcaggacgcaggtgcctggaatggtcaagaaatatgacaaggacaacaggatggtgaagtcctctcagactgggagctgcgtctgtccatgtctgtgtctgtgtgtgtctgtgtctgttcacgtctgtgtctgtgtgtgtccatgtctgtgtctgtgtctgtgtctgtgtgtgtccgtgtctgtgtctgtgtctgggtgtgtttgtgtggaggggtatgagttctcaaatcctgccacctcatgaacagatccttttctggtagatgctattaaacacagaagttacaattgtaacaatatctatgctatacttattgttgtcaccagccgtgcattaatcattgagatgataactccaattcaggagttatcagggccctatgcctcagatagttttaaatttgcattttcttctaggggagtatgacaagttaatccaaaaaagacataaataaatgttgttaaataaatttggacttaggagaaactttactggataagatattcaaacagaaagaaagggactattgcaatggggaagagggactattacaatagggacaggggactattgcagtgggggaggaggacctactgcaatgggcgagagagctgctgcaatgggggaggaggaccattgcaatggggaagggagattattacaatcgggacagggggactatttcaatagggacaggaggactattgcaatggggaagggagattattacaatagggacagggggactatttcaatagggacaggaggactattgcaatggggaagggagattattacaatagggacagggggactatttcaatagggacaggaggactattgcaatgggggacagggatcattacagtagagacagaggtactatttcaatggggaaggaggactattgcaatggaggaggaggacctattgcaatgggggatggggattattacaatagggacaagggaactatttcaatgggagaggagaactatttcaacagagaaggaggacctattgcaatggggaaggacgacctgttgcaatgggggaggaggactattgcaatggggaaggaggactattgcaaatgcgaagggggattattacaatagggacagggggactatttcaatgggggaggaggactatttccttttttttttttttttttttttttttttgagacggagccttgctctgttgcccaggctggactgcagtggcacgatctcggctcactgcaaggtccgcctcctgggttcaagccataatcctgcctcagcatcccaagtagctgggactacaggcacccaccagcatgcccggctaattttgttttgtatttttagtagagacggggtttcgccgtgttagccaggatggtctccatctctgcacctcgtaatctgcccacctcggcctcccaaagtgctgggattacaggcctgaactaccgcacccggcccaggaggactatttcaatggaggaggaggacttactgcaaaccgggagggaagccattgcaatggggtaggatattgttacaaagcgggaaggaaactattgtaattgggaattacaattgggaattggaagcagttattctccaaccatgagacctgcaagtatctgaagaggtaggcactcctctcttttgtagagaggagtaaacaaaactaggaagagcagagtctggggcagtgacatggatgggaggcacatggtcaaagaaggtttgacctgaggccggcctcttctcagaaggggctgcctgcaggcgcaggctgagggcagtccaagtttaggagcccagggaaggaaagaagcttaaccaaagtttggttaatgaggattttgttctgattgatcagtgggcagagcaactcagccaatcactgatggccaaagaatagaaacctggaaggcctcacactggccttgtcctaggtcaacatggaccatcggtgacttgcatctacatcacatgggaaggtcattccttgcagtaaaccattttctggaacacaaaagggtaagaggatttcctaacctccagataaagttcaacgttgtcaatatttaatgtattacatttagataaaatcagtagaggccatagaatagaaatgcaaattcacggagaaaagcattcccataaaatttctgtcagagagctggttttcacgctttttaaacgactagcggctgacgtcagattgctgtgctagttagattccattggatacattttaaagatgatgtgaattttgtttaaaatgtcaatattcaaattacgctgattccctacttgactaattaaatgtatgatagaagtgtttagatatcagctttaaaagtacaaaagggccgtggtctttcaaaacactttagaaattctataagtaaagatctaaagactgctgccccaggagtgggtgggagtgtgtcttcaaggtgattctcaaaggctgccttagccatgggtggttgcatgtgatcccatcagcagcccagtccaagtagaactggaggacaagacgtgcccctcagcctagtggtcagccctctggcctggaggctgcaggtgactcctgtggactgacaggcttagtaatggaagtgcttactgctcaggtcccaatccctgggggacccaggcctcaggattttcacctcccaggtgactcccaggtaactcccagatgagacaggttgaaagcctccactggtaaaaaggcccagtgcaccaataagcaaagggtttttccttctttgtttttgtttttaacgtttattttaggttcagggatacatgtataggcttgttacatgggtaaattgcatgtcacaggggtttggtgtgcagattatttcaccacccaggtaataggcatagtacccaatagtttttctgtcctcatcctcctcctttcctccaccctcaagtagactctagtgtctgttgttctcttctttttgtctgtgtatactcaatgtttagctcccacttataagtgagaacacacggtatttgcttttctgttcctgtgttagttctcgtaggattatggcctccaggtccatccatgttgctgcaaaggacacaacctcgtccttttttatggttgcgtaatgttccatggtgtatatgcacaacattttctttatccaatctaccgttaatggacatttagcttgattaacagacactgttcaaaagaaaacatacacgtggccaacaagcatatgaaaatgttcaacatcactaattattagataaatgcaaatcaaaaccacagtgagataccatctcacactagtcagaatggctattattaaaaagtcaaaaaaaaataacagatgctggcaaggttgtagagaaaagggaacgtaaattagttcagccattgtggaaagcagtttggcaatttctcaaagaacttaaagcagaattaccgttcgacccagcaatcctattattgggcatatacccaaaggaatattcattgttctactgtaaagacgcatgcatggtgtgttcatcacagcacaattcacagaagtgaattttttttttttgctttgtatttgccacactgtagctgatcgacctgagaaacaaaagagtactgctactaaaggaacccaagctctgagttgtctcaagtttcctcttttcctgtttttctcaggtagagtttctctcctttagctcattctgtcctgagagaaacaccactcccggatgttgacccatctatagcaggaattctccaagtgtggcccctccccggccaggcacgggtctgggaggaagccggcaagaagaaccagcctgctttgggttttcacctggaaaagaggcagagccatgttgattttagtttgtgtaaagcaatgagctatttgcctatagcctatgaaataaattattaaagattacaggccgggtgcggtggctcacgcctgtaatcccagcactttgggaggccgaggcgggcagatcacgaggtcaagcgatcgagaccaccctgcccaacatggtgaaaccccgtctctactaaaaatacaaaaaaaaaaaattagctgggtgtggtgtctcgcgcccatagtcccagctacttgggaggctgaggcaggagaatggcgtgaacccaggaggcggagcttgcagtgagcagagatcatgccactgcaaatccagcctggcgacagaaggaaactctgtcttaaagaaaaaaaaaaaaaagatcactactaatgctatgtattccctagctaaaatgagcagcctgctactttacaaaaaattccaaagtggccccgacggtgccccgagcgcttcccgcttctcccttgttcatgaagctgcctcatatcccgggaactaggccacactggccattaaagacaccgtcctatgagaaaatccatagacaatttaacaatgtggattagtccgatctttacttaaaatataaaatgtgttaatttcatgacacacattagaaaggtcagaggttgtgtgtatataaattccaatttgccacattgtttttttccccaagctctcatttgatgaagccatttcattctaactctccttgcctctatgacatgcagtcttcttgtcacagacgtgccttttgagctaatcttttccaagagaacattataaggtcttcagtttcccctaatttctttgagctctgctgacttcaagatactgttgctggaaactttatccctagctataagtactatttatacaacattagaacattgtttctttttcattccttttgtaagagaatttttttttttttttttttttttttttctttttttgagacggagtctcgctctgtcgcccaggccggactgcggactgcagtggcgcaatctcggctcactgcaagctccgcttcccgggttcacgccattctcctgcctcagccttccgagtagctgggactacaggcgcccgccaccgcgcccggctaattttttgtatttttagtagagacggggtttcaccttgttagccaggatggtctcgatctcctgacctcatgatccacccgcctcggcctcccaaagtgctgggattacaggcgtgagccaccgcgcccggcctgtaagagaatttacacaacatagacaacctattgctcttaatgtggtctttacatggcttttttttttttatatatatggagtctcactctgtcacccaggctggagtgcagtggcgtgatctcggctcactgcaacctccaacaaggcttatttttaacaccctacacctctgaatatgaggtcatacctcctggaataattcaatcagtgttaaatatcttttcttctttatctactgttagtgattcacccccttggctactctggacgtccccagcaagcacagattgaggtcaatccaggctactgtgcctcctggaaaaagaaactggccttttgtagaaaagctattgatgttatgtttcacaataaaaacatgagtttaaaaagcaagtataagaatgccttataaaagacttcatgagaatttaagtggaaagcaacctactaatctcttagaaggttattttttgagggggaagaatatttaggaacatattcagtgattgtgattgctgaagattttcaatttgtggtatcattagtgttgttttgagttggctgtggttttccattgctgcttcatgctttctgcttataaattactcttaatatcagtcttagtattatcaatttgattttactcttgagttaacaaattgttaatcaatttgtgttgtttggttaactcaggagtaatatgttaatagaactgtctaggattttcctgtaactaagcctggagccttgtaccattggaggtcacatgtgctacctgaactttctctgccagataaacatagtggatgcagcctaatccctacaggccttattcaggcattaacaatctgctgcctgtaaatctgcacacatgaaaatataggcaaaattttctcacagtaagtatattaaaactatcatattatttgtaactgtatagagtgttgttcataattcaagtaatatatataagtcgatattctcttctaattgaagcataaataagtcattcataaacatttctagggcaagttgaatatttccttgtctccattttgttgttatcacaaaattctttttctgatgcagcatgaacatgggtagatactggcagacctctaggtcttttgctctaatttagttcactgtgatcaaggaagattctgaattagttgatctctaaattctatctagttttgatttctaggcactcaggagaggtatgcagtggggtgtgtgcaactgtgcactctcatgcacacaagctcacccactcaagttacatgtatacatatgcaggaaggcacaagtacatacatgtacacatagacacacactttcacacaggcacccctgtcatcctttgttttcttttcagcaattccattctccagttcaagattcacccagcaagagtgaggacacttcagtctctactgatggtagaaagggaggaagagagaaggaaagggagtgaagaatcattgaaagtttcatgtgttccattaaataatcatatttttgtagtcatatagactgatctgaaatggttctctcatttctcatttcttttctctcatttctcttctcaggaaataaaaatgacttaataacgaagcctgaaataagctgtctgagaggctttacgtggtggttcatgtctgtaatcccagcactttgggaggctgaggcaggtagatcatttgaggtcaggagtttgaaaccagtttcaccaacatggtgaaaccctgtcctactaaaaatacaaaaattagctgggtgtggtggcacgtgcctgtagtctcaggtacttgggaggttgaggtgggagaattgcttgaacccaggagatggaggttgcagtgagccaagatcgtgccactgcactccagcctgggcgacgggagtgagactccatctcaaaacaaacaaacgaacaaataaaaaacaaaaaatactgcctgagagccacgttgcacagaaaggttgaccctcagttggcatctgacccattcagagcaatcccccagccctcacaatggtcagactttgactcatggacaaagcaggttgggaggagctggtcacagagctgtgcctaaaccaggccagccgcctccccacttggtgtgaatgacacaccatctcattcaatctttcaagcagtgttctgtcttttagttctggctcaggtaagggaactgagggcgttttgggtctggataattgtcttgggtctggagaccgacgaaggtttttaggggccattactttcaaataacaaatgccttctgaactgtaaatttctgtagactgccaagcagcacagcaaaggggaatgcacagcaatcatccaaatacactctcaggttcaccacttcatcctctgtcctcccaaacttagcagaaatggcaaggtctccctagaggatggttctcagctctagagaatctaagccaaccattgaaattccagcttccttgagagtaagtggtcagagcccccaggtctaagccaatcaacacaaggcatttccacggtagccaggaatcggctcagaaatggacaggagaccaattaaagccaatgaaacagcggggaggttggctggaagctgctggaaaaaaaatcccttgctctgtaaagggaagacgtctttctctgtcactaaatgttaccatgtgtatacactatgactgctgtggccatctgtcaaccaaaaacttttaggatgaagcttagagacataaaaataccttgatatttggtgaccttttaaactaatcaaagtcccagtaaatggtacattgaaattgggaaaatttagggaaagtttaataaagtgactgttttaaaaggtgtagaatggataagggaagtacttgcttgaagttagtgaatgtgggaggaggtgtccccatcctgttctccaccaccaagttctgaaaggggagttgggaggtaccttcccagaacctgaagaccgagagcctcatggataggccttctgggaggaggctgcaccagcctggtggtgggggtgcctacaggaagacagctagggaaataaatacccaaactcactttgctttctactgtgatcacctgctgatgctccccatttgctgaattcaaatggaagtctgtaaggtcagcttgctgggacagagagggctgcggaggcaacctggaaggacaagtgcaagctaggcacacagcctcttagagcaatcggacactgctggatttgcagttgcatgaggctgttaattgctttattttaaagacactttgaattgccatttctgcttattgcactcaaaagtatcttaacaatcatagagaaaatattctacatacaaagccatactaaaaaataaaaaatgttatgggttaggaagggaatggatatacacagaaggggcaggcagaacccacagatgtagaaatgggcagagccaccaggatcccagctcctgaatgggaaggggcatctgtggtgtgtgcttcaggagcctagagtcagcctctttaggaaacaaagagaggagcgggactttgctcccaggagtaaaaggccaggttgctttgataaggactgcttgtctgaccttggaagaggatgaagttcgaggtggagttaaacgcaggcctaccagccacaacagagaggtgagagaagaaggagagctaaacaaaccaagcgatgggagcttgcaaaagagtgtttcaaagccgggggaaaaatacatggcttgaaaaaatttacaataaatgcgacaaattggagaatgcttctgaggaaatctaaatgatagaccaatcatcagaggatttatttaactgtgtgtgatgttcaaagagacgaaagaagggacgaccacaggaaaaaacaaaaatagggtgctgtgaacagcttgagcagctatcaacatgaagacatggattagataaatgaaggattggagattctgaaaataaaaaactataaatattgaaataaacaataaacaagtaaatgcagttaaagcgagaaacagcagattgtactaaggaattaatgctaacaggacagagagacaaagaagtaaaaacatatgaaagagacaaaataatatggaaaataatataagacactccaacatgcatctaatagacgttccagaagtagagaatacaggaaatggtggaggacatatgcgaattataatacctgacaattttccaaaattgaagatagacatgattttccaaatagaaagataacattgggaaacaaggagaataaataaagataaattcatagtcagatgcagtgcattaaaaacgcaggatatcaaggaaaaagagaaaatctaaaggctactagagcaaaaaagatttaaaaaaaaacctacacaaagctaggaagattaggctaagagctgacatctcaacattaagaatggaaggtggctactcaggaggctgaggcaggaggatggcttgagccccaggagttcaagtccagcctgggcaacacagtgagactgtgtcttaaaaaaagtaaataaataaataagtaaataaataaataaatagaggaaggtggtgaatgaaaatattcaaaagtcagaggaaaatgactttcaatctagaattctgtaaaccaccaaatttttattaagattgaattcaaaataaagacttcagactgaaaaagacttaagagtttaccagacagacttttgatgaaaactataaataagtagttctcaaccttgcgtgcccattaaaaccaccaggacattaaaaaattccaatatccagaccaaacctagatgcaggaggtgttgctttttgatcttcccaggtgattccagtgttcagccagggttgacatcactgcttcacctaattactccagaagaagaaaacttattcagaagaggttaccaagagcaccaaaatcagtcaactgccagttaacaatgaactattatttggggatgggatcctctgtgtgacagtttcattgcttggtgtgagggtttttgaacaatttgaatttcatttgtctttttctctcccaagtgagtttttcctgttcatttttcaagtaacttatatttgttttggggggaagggccggttggtggcctaatgttattcacatcaatggactgtaatctcgctgcacattagaagctagtccctgtggttccactttaatctgtaagcaatgaggctcacctacaggagttgtcaaatctctccaggggcagccaagtttgagaaccaccgaattagttctctgggtcaaggacaccagaagaaatgaagaggagaagggagcattgagtctactgagcagttgtggagaccccttagaaagaacagcactgagttctttagaaggtacagaactggctcattttcacaactatcttaggtaaagaatcagtgcattaaacaaattactgttttctgaacaaattggcaatatcaagagtgtgttggtaatttagaaaattgcttatttttatttcttcttggcctatttctactattcacatctggaacagccagctcattcgagggtgttggtggttcagaaatctaatctcagccaagctttttctggggggaatttggatgagtcagtttatcgtttggtgcggttacttccttaactatggtggggaaatccaactaatcttatacgtatgtgtgttttacaacgatttgataccacgctctgggcaaggcactgggtggttattggacgataaggtgattgtatggggcttccttgaaagcctagtgaccttcattcaagcatttcattttagttcatttcaacaagcattacctggagcgtctgttacacagatgtcctgaagcccaggatgagtaagacaccatccctgccccgaaaattgaaatctgtcataaataattattcttggaacaggagttgccaatgtgaatgcctagggaacaagacggtgatgctgtaagtccagaaggcagtgaacaggaaaagggttatttatgtgagcacaaaaagcaaggcgctcattaacccagctgtctaaacaagggcatctccaagtcgacttccgtgagaccttatcactaaaataaaagctggcgaactttggaggaattaaagcactcccttctagaatcaaactgctgcccagcctctcagggttttccacactttcatatgcgtgaaaacccccggcacgcttggtgtaaaatgctgattccctggtcctacctgcgcagacgctgcatcagtgggtctgaggcagggcccgggcatctgcattttaaatcagctcccaggaaaattgttgcaggggtgggtcacactttgttaaaccttgtgggtgtgggcacttctccctgcagctccttcctctaacagccgggtgtgtcctctgggtcccttctggccgacctcctctgggcaaaagtcacttctctactgacctgaaatctgccacacagctcagtaatggctctgataaacagggacatctcatttattgtttctttcctggaacactttatggtcatcagtgagctgtcaccatgagggctcatccagtctcaaggcagagagcctccccggcagtcagcagtggctcaggggcccaggtagcagtgtcctgctggcagggtcaggtgactagtcccctgcagagtctctaggtaggtgggctttagagatcctctggtttgattctctcattttacatgtggagaaactgagaaaccgaggctttagaaaggccatgtgcttccctaggtcccagcactgaggcagaaccgggctccactagggcttcctgctcccttcctctctgctccaacctgctccagcccctttatcctcgctttaccagattctgccatgtttggggatatttgaggagtgccacattttgcaggattctccatcagcacagagtgcctgtcgtgtgtcgactcccaaggccagcacacctgcaccattggatgtgcctgaagcctgcctctatggccctagagcagtgtggaggggaccccagctttctccccacctggggcaggatcacttgcctgacttgcagggggatggacggctggtgcgcactctgttgcgctctctctctctctctctcacacacacacacacagacacacacacacacacacacacacacacacacacacaccctcacagattaagagcaccattggattggtctgctcaggccaagatcacagtcagaggagagaaagaagcatgacccatgatagcatcaccatcaaccatgaggcatcatcactgcccccaaaataacacagacaagggagggccagggactcagctttggggtcaccaccatgggggccagaatgagccttcatcacccgggtttgcaaggtgtgggccagaggagcactagcaggcaaaggctgcagtaggaccgcccagggagcagtggcttgagccgcccagacacagagacacgtggcaggcagcatgttgaattttaaccagaatttaatgtaggcagttttaacttttgccttaaaagtaagaaaataaactaaaaaaaaaaatgaaaacaaaacaaactaccactctacagaataggagaagcgccacacgggccttcgggctccacaaatgtggcctggcccggctcctccagcctcccggagggggacagctggcaggcagatcctggcctggaaggttctggaggcagctctcctaaaggagtcatctgttctgccattgagtggccgtgtaatgctccccagccctgcggtcacccggggaaatcccctagcagggagctgcggctgctgttccccttcggcctggaagtttgtccaggttggggcagcaatggggtgaatggcctggaacctgaatgtccgagggcctcgcccagctgtacttcctcctctcacgtggcctctctgaggagtgaattatgaagtcatcctcactgcggccctccaccactccagctcctaaagggctggcttggtcaagctgcctcggagggtcaccagccttgggatacgacacctgcaggcggtgggcgctgccctggagccacgccattccatctgctccgactctgtctcacactgtctccttcctccccttcctggccaaacttctcaaaatagcatctgctgcttaaagcttctcaccacctcctcatctgtagtgccctgtagcctggagtccacctagaactctacaaccagtgctctaagaaggcccatgccctcccgttttcacccactggccctggtgttgttctcaccctcagattttggcaacacatgccccttcttcagatgggcaccttcttttgccttctctcccaccgggacactcattccccctccgtgcccccaagtacacacacctgagaagtttccagttctttgctccgcatctcttcccctttggcactctgcgtgctgctgtctgccccttctgaggtgtccagatgagcgatgctccatctaccctctctcctaagctccatccaacagccttgggaccaggaagttggtcctgctgggtcatttgcagagttgctggggcacctcagagagaaacaagatggcgcagggggccatcagcagtgcacagccaagtcttcaggtgacagtgctgaacaggggtctcaggggagctggaagaaaagtctgtcctttaggccacttggcacagctccaaccagaggtgacccgcctcccacctcctgttcttcatcctcccctttgcttcttgacctgcctgaagaagacccctgggtctggacagctgggcctctggctgccccagcaggaagctcatggtcctggagtcctgggagtccaggctggaagatgtttatcctccaggtgtcaagcaccctgggtgtgtccagatggtggaggaggaactggctcttgaaagaagatgtccttcccatctcttccctccccagcaatttctactgagttctaggtggacaccagatggcaagaggcagagtgcagggggacggtgagaagctgcaggtagcggatgtgatttcgagaagtttgacggaaatgtaggaaggagaccctacgaggactggagggacccatgagtatgagaagggggcacggagagattgaaggggacgggtcctgaaagagcccggaggacagagagtccggcaagtcccaggcgctgccctcacaatccgattgagagccatggaggggctgcagcagcggctcagggttgtgtttaaaattagctggcagagttcactgctgggcattgggatgtcctgcaaatggctcaacacgcaggacgcagaggctttttcacagaattgtttggagccatgtgcctctctctctcctgaaatgaaagatttgggaaaggtgacaatgctgaattttcttcttcctctctagatattctttctgctacatttgatggagcttccaggaaaaagtagatagtaactaaaactctctttgatttcagacttgatacatattttcagcttgagaatccttatttctctgtttagtaaaaggtggctgggttcagtggctcatgcctataatcccagcactttgggaggccgaggagggcagactgcctgagctcaggagtttgagaccggcctggccaatgtcatgaaacctaatctctattaaaaatacaaaaattagccgggcatcgtgccaggcgcctgtaatcccagctacttgggaggctgaggcaggagaatcacttgaacccaggaggtggaggttttggtgagctgagatggtaccactgcaccccagcctgggcaacagagtgagactctgtctcaaaaaaataaaataacataaaataaaagtaataaagaaaacatgtaaaaatgtgcgcttgggtgtacctgggaatggttcacgtttgccctttcgaaggcagcaaggcagagagaaaggcacgtggagtttgcagtcagatggaccagactgggtttgaactaggggtctggtcgttacccacaggtgaccccattgccttcatctctctgagtctcagtttcttcctgaacaccgttaatcatttcaggcctggcatggtggctcatgcctgtattcccagcactttgggaggccgtggcagaaagatcacttgagcccagaagttcaagaccagtctgggcaatatggtgaaaccccaactctacaaaaatatacaaaaaagttagctgggcatggtggtgcatcagtagtcccagctactcaggaggctgaggtgggagaatcgcctgagccaggggaggtcgaggctgcagtgagccttgatcccaccactgcactccagcctgggcgacagagtgagaccctctctcaaaataataataacaattaattgttccaacagtgcaggaaatgcctagaatcgcactcgccccacatgttaacaccttcctgcattcccgctgcatttagcagacggttcagtttctgtggtgaccagtgaggcttgtgagtcacttgttccggaaaactagagcaaaacgttgctctcatatgcctggttgtttccttgttgctaaatctttttttttgtttgtttttcgtttttttttacagctttcttctcaaccgacatctggaagccattcagtgctgcatacacttcctgcaggctgcccctctgttctctcgcccttctcatctcacgtgattgatcacctgacaagctacctggatttcctagtgccccagagttgccctcaatcaacacacaacacgttcccatgtggaatcttcaccaagtgttcatttcttccattacaggaaatagtattctctccctgtccccaaaactttgcagtaaagacccctgacaatctagttcaaatgtcagtcatgacactgctagctttctttttacaagactgtgtgagtccccctgcaaaaaagtcaaactgaattttatcacatgatatctactatagtccttcaagcaattgtcactgcatcttttcagttatggttaccaaaggttgtgtttaaaattagctcgcagaatttactgctgggtgtggggatggcctacaaatgacccaaatgaccaagattcagtgttgttcaaattgtgtatgttctggaaaggagtcactttgtctacttgaactttagaagttatttactaatgttgcagtgtgatacaattgatcgtaatctaggctgggcaccgtggctcacgcctgtaatcccagcactttgcgaggccgacatgggaggattgcctgagctcaagagtttgagatcaccctgggaaacgtggggaaacaccgtctctactaaaatacaagaaaaaaaaaaatagctgggtgtggtggtgcttgcctgtagacccggctcctctggaggctgaggcatgagaatcacttgagcccgggagccgagatcgtgccactgcacttcagcttaggctacagggtctcagactccaactcaaaaaacaaacaaacaaacaaaaaaaacagcactctgggaggctgagatgggtggatcacctgaggtcaggagttcgagaccagcctgaccaatatggagaaacccggctctatcaaaaaaaaaaaaatacaaaatacaaaattagctgggcatggtggcacatacctgtaatcccagctactcgggaggctgaggcaggagaattgcttgaacctgggaggcggaggttgcagtgagccaagatcgtgccattgcactccagcctggccaacaagagcaaaactccgtctcaaaaaaaaaaaaaaatctaacgggaaaatctcaatttcagattgatttttagattgaaagagggaagacagcacgatggggggaaattggatgaactctggcatctgagcaagtctccttcttgttaaaacccaacagtggtttggaatgggataaaccctctgccttgagcacgtgcctgggctcacccagctcgcctctcgcagtgcctcctgcctggggaacctggcacacctgttccttttacctggatgctctttccccctctttgcctggttaatcctgctgaatccccctcaactctggcctcaaagctctccttccttgatgaggttttccctgacctctctgatgagctcacatcccagagttcatgcttttatagcaccgcacatccctacagttgctctgggggatgagctgatgtctgcctggtacctctaggagcctgtctcagtgcctgctctgtccacctgctccagcccaggtgagccaggcgtgggctgtgccaagtgaaggccttgccatcctcagcactttgcaagtttatcacagtgagtttacataactagcctgcagaggaggcaccaccgccagctcattttatgggatgaggaaattgaggcttaaggagattaaatatattgtccaaaggccaacagatgatgaaggataggtttatcatcaagctaaatatttttcaatatttccttaaatcagatctggcttcgactgagttatccagacaattgtcccagacttggcttccctaggggcacctcgaaccctaatttgtaatccagagggcaaaggggccacagagtctttcaaggtggctcctggagatgaggagcccaagagctgacttcctgtttcctcctcagtcacctgggtgggattggttgggggagttggagaacagcaatcaggtcccccccaccaccaggaagccttgcagagggtagggcaatgggggaccccgtcccactcagagggaaagcatggtctgcgtcctgccacaggaaggcagcagctgaaggccaggaaaggggagggagtttcctttgcttctccagcaaaacagaatggatggatggatggatgggtgggtggatggatgaatggatggatggatggatggatggatggatggatggatggatgggtgggtagatggatggatgggtggatgggtggatggatggatggatggatggatggatggatgggtggatgggtgggtgggtggatggaaggatggatggatggatgggtgaatggatggatggattccatctattcttgtaaggattgtaagccttgccagtcatggcttggatgccacttttagagactagtttccatcttcactggggctgtctcatgagttactacaatccttgtcagtctttcatgcttgagtgacagtgagtgtcagctcacccctgtcctgaaagctaagactttcacatagaaagaagggtccctagcgactgagggtttaaagtgccaggaggaagtggaagggccctgcagacaatctgtgtccagggtccaaacttttctctgtcagccctgccccatttgcaagccccagagcagcaacctggaagagcagagccataaagagcggggctcctagaagggagcgagcctggcttcaggatcaacttttctgctggggcagatggcggcatgcaaccgaggtcctagggcacggatgtaagcatgtatgagaggtcctcctggggacctggaggggcttcgtgagtgtctgggatctgccctcctctgaggtctcttcctggagggagaataacacacctgcactttgtcacccaaggccagtccgcttccgtcacccttgcccccaagtcccgcttcctcatgacggagtaccaaaagcatgggccactcgtgccttcagcaattgtttatgtgccaggcactgtctgggcagcaggatgtcgctgcgagccctctcccaacacctgccgcgcatgtactgtgcccgcgacttcgccgcggctcagtgggtgggtccagtccttccagccctcgccatcctccccaccacagattctgcctcctggcacctttgccttgcccagcaggctgtgaggcttcgcatagacgctgccacccacccgcatcctcctaatgtgactgtagattgcctcaagcaaagctttaagagcacacatccacattcgttcttggacctaatctttgctcaattggtctggatttgggatatgaactctttggttttgaacaccctgggaccacaagccagttgtaaatgctcatgacagccagaaaggcctggaacaggaggaacataaaaaacaagaaggagagcagagggtgggctgtcccagaggaagagaagtgacaggaggctggcacctcctccagacgagggctggacagggtgctgcacagattgtccaggtatggagcagaaccaaaacctaacaaaggccaggagggaccagagccgtttgggaaaagtggaagcagtttggcgtcgctggtattttctgggtgtctcgagatgagatgcaagctgatattatattagacgcatttgaattgtagcttagagtgtcagactattttacaatgctttaaaattctagctttgtttcacaacgttcctataaagcagacagggagcactgttttcattttatggactgagccaagcacacggccgactcgctcccggtcaggtagagttagagaatgagcagagatgcaaactctgcagctgctgcttcccagtgttggcaaagtccacaggatgggtccttccaggctggggccttgggcttgtcaccgcctcctttccagaccccaccctcgggccccctaggatgcaagggggaatgagcagaggggcccaaggaaatgggggacccagctaaacaagaggagctgacagagctgctgggagtgggaaaggaaaaatctcagcctttgcccaggaagcatccgaggcacccagactgcaggacatcttccagtcactctcaatggccacccacccctcaggtgcaccccctgccactcatatgaagctggaacacacagatatccatatccaaaaaaatgagcctcccctcccttataccagatacaaaatttaattcaagtgaattattgacttaaacgtaataatgaaaactataaactcctacatttgggcaggcaaagattttttaggcagcacacagaaagcaccagattctatcaaataaaaattattaagaaaattaggctgggtgtggtggctcatgtctgtaatcccagcactttgggaagccaaggcaggaagattgcttgaagccaggagtttgagacccgcctgggcaagatggcaagatcctgtctctacaaaaaaattttttcattagccaggcactcctgtagtctccgttacttgggagactgagtcaggaggatcacttgagctcaggagtttgaggctgcattgagctgtgatcacgccactgtactctagcctgggcaacagagagagatcctgcctctaaaaaaaagaagaaagcagccaggtgcagtggctcatgcctgtaatcccagcactttgggaggctgaggtggacagatcacctgaggtcaggagttcaagaccagcctggccaacatagcgaaaccccatctctaccaaaaatacaaaaacttagccgagtatggtagcaggcacctgtaatcccagctacttgggaggctgaggcaggcgaattgcttgaacctgggatgcggaggctgcagtgagccaagactgtgccactgcactccagcctgggcaacaagagcgaaactccatctcaaaaaaaaaaaaaaaaaaaagcaagaagaagacaggtaacgagaaaattaacaggcaacagagagactggggagaaaatatgtgcaatacatatagctgacaaaagaattgtatccaaaatatgtaaaacactggtacaacttgaaaataacatgaaataacataaaatttagaaacacaaatgacccaatgaaactatgggccacaggccgatattccacataagaagatacacaaatggtcaatatgtgaaaaaatggccttggaagagtaacttagtcttcccaagcctcagttttcatatctgcaaagtgaagataaaaataaccacaccaggccaggcgcagtggctcatgcctgtaatcccagcactttgggaggccgaggcaggtggatcacctgaggttgggagtttgagaccagcctgaccaatatggagaaaccccgtctctactaaaaatacaaaattaaccaggcatggtggcgcatgcctgtaatcccagctactcaggaggctgaggcaggagaatcacttgaacccaggaggcggaggttgccgtgagccaagatcatgccattgcactccagcctgggcaacaagagcgaaactccatctcaacaaaaaaaataaaataaccacactgttcacctcacagtctttaaaaattgtggtaataaacacacaacataaaatgtaccatcttaatcatttttagacccacagtttaatagtgttaactctattcatatcgttgtgctctctagaactttttcattttgcagaactgaaactacattatacatggactcctcattccccctcttcccggcgctgacacccaccatattctactttctgtttctgtgggtttggctactttagactcctcatagaagtagaatcataatagtatttgtcctcctgtgactgggttatttcacttagcatcatgcactcaagtttcgtccgtgctgtcacatgggacaggatttccttctttttttaagaccgattaacattctcttgcatgtgtatgtcacgttttgtctatttatttatcagtccatagacacctgggttgcttccacatcttactattgtgagtaatgatgtgatgaacacagatgtgcaaatatctcttcaagaccctgatttcaattcttctgggtcccagaagtaggattgctggatcatatggtaactctatttttaagttttgaaggaacctccatactctttttcacagtagctggaccattttacattcgcaagagtgcacaagggttctaatttctccacatcctcaccaacattcattattttctattatcgttgttttggtagtagccatcccaatgggtgtgaggtaatatctcattgtggttttgatttgcatttcacttgagaagcgatgttaagtatattttcatatgcttcttggccatttgtatatgttctttgaagaaatgtctattcaagtgctttgctcatttttaaatcaggttatttggggctttttgttgtggctgagttgtagcaattctttatatattctgtatattacccacttgttgcatatgtgatttgcaaatattttctcccattgcataggttaccttttcattctgttgattttacctcataagattttttaaatggctgtattgaggtattgtcagcttacaataaactgtgcacattagaagcacacagttttgtaagttttgacacaggcatgttttgatataaaggttcttttgatggcaggatgcaacccagtgcaactcagatagatgaaagcagcagtctttgctacttccaaatgagagaaagctgttaggcagggccacatagagggttgcctggggacagggtaacagcaagctggagctgtgggggcagtttctgtattaccagcaaggtgggagtagatggtgttgaaagaaaaccttcagacaaattaaacttagcagagttatataagcaaagaacaattcatgaattgggcagcactcagatccagaaggggttcagggaactctgcccagcagtgtgagcagcaagattctacaggctgagcttttataggctgaacatggaagcaaagtagggaaatcccctgattggctacagctaggcatctgccttatgtgggcatggtgtcaggagttggctgcctatgattggctgagcctcagctgtggtactcctaagttaggtttcaatttgtttacatagtaagttaggttgcaatacattatgcaagaactgtaagtacagaaacagcttcaggtagtggtctcctacttatttaatttcacactaggttttgggtattccttgtggattggctaatttgaacagttctgcagactctaaggcacaggggctctccctagttgtctggtacctggctctggggtgattagcacaggtatatagcagcccctgaatgtgattgtgtaatcagctgcttacgaaggggaactgactggcctctggccagggcctcaaaactggggcaagacagcacttttacaaatataaacatatatgttatatgaaatatatatcaatgtattcatgtgtaaaactctcactatagtcaagataacgagcatatccacacccccagaagttccttgtgcccctttgccatggccccctgtctgctcacaccttctcatccttcatccacttcctgtcactgcaggtgagtttgcattccctatcatcttgtacaaatgaaaccagacagtaggtgctctctttctgcctggctcctttcactcaccataatgactttgagacttgtgcatgtcatctcctgcatcaggcattctttttttttttttcatttctgagtagatttcactgaatggagataccacatttttttatccacttgtttaagaacattgtagtttgcctacaagagtttgcatgaggccaggcccagtggttcacacctgtaatcccagcactttgggaggctgaggtgggtagatcacgaggtcaggagttcgagaccagcctggccaatatgatgaaaccccgtctctactaaaaatacaaaaattagctgagcatggtggtacatgcctgtaatcccagctattcaggaggctgacacaggagaatcgcttgaacccgggaagcggaggttgcagtgagctgagatcacaccattgcactctagcctgggtgacgagagcaaaattccgtgtcaaaaaaaagaaagaaagaaaaaaaaaagactttgcacagacacgtgctttcatttctcttggatagatacccgggagtggcatggctggatcatatggttagtgtatgtttatttttatatggtacagactctagatatgaagtatgttttcattttaaagttattatacagcaatatcgaatttggagggtgaatattaacagctatatagattcatgtaactgccaccccattcaggatatagaacattcctatcactccaaaactccctcattctaccccctgatagtcacatctttccatatccccaaactctggcagccactgatttgttctccatcactatctttttgtctttttgagaatttctttttaaatttttttcaccactgatcagaaggcagagagttttatttaaaggtgtgtgccagtaatcccagctactcaggaggctgaggcaggagaatcgcttgaacccgggaggcagaggttgcagtgatccaagattgcaccactgcactccagccctggtgacagagcaacactccatctcaaaaataaaaaaaataaaaataaaataaagggaattgggcagcatgtagcatttaacagacttctttcactaatcctctgatattaaacctggttgttgagtgcaccaatagtttgttcctttttattgctgggtagtatttcacggtatgaatggaccacagattgtttatctatcacctgttggaggacatttgggttggttccagtttttagcaattgtgaatagggctgctataataaactttcatttcaggcttttgtgtgaacagaagtttttaggtttatgaagtaaatttcaggagtgaggttgctggatcatataggatgtgtgtttaacttttttttaatagactttattttttggaacagatttaggttgacagcaaaattgagcagaaagtacacagatttcctatatggtccctccccctctcctccccgacatgcacggcctccccactatcgatgttctgtggcagagcacacattgttaccatctatggcctacatttatacgtcataatcatccaaagtccatagtttagggttcacacttgctatttgtattttatgagttttgacaaatggatcatgacatgtccaccctgatacctttatacagaattgtttcactgccctaaaactcctctgtgcttcactgattcatccctccctccccactaactcttggcaaccactgagatttttactgtctctgtagttttgcctttcccagaacatcatgtagttggaatcatacagtatacagcctttcagactgccttctttcactgagtaataggcatttaagtttcttccgtgtctttttatggcttgatagctcatttctttttagtggtgaataatatttcattgtatggatgtaccacagtttatttattcatttaccactgaagggcatcctaattgctttcaagttttcgtaattaggaatgaagctgctataaatgtctgcatgcagggttttgtgtgatcataattttgtttttatttttgagatggagtttcgctcttgttgcccaggctggagtgcaatggcatgatcttggctcactgcaaccttcacctcctgggttccagtgattctcctgcctccagagtagcagggattacaggcgcccaccaccacacacagctaatttttgtatttttagaaggagtgacaccatattggtcaggctggccttgaattcctgacctcaagtgatccacccacctcagcctcccaaagtgctgggattacaggtgtgagacaccacacccagctgatcataaatttttagctcatgcaggtaaataccatgattgttggattgtatggtaagagtatgtttagttttacaagaaattgccaatttttttttccaaattggttgtagcattttgcatcccaccagcaattgatgagagtcctcaccagtgtttgctggtgttggcgtttcaaattttgggtacttgaatacttttgtaataatatctcattttgtcataatgtttgactttttaaggaactgtgaaactgtcttccagagtggctgtaccataagcaatgcctgagagctgcagtggctccacatccttgccaacattttgtgtggctactctttttaaattttagtaacaaagtttctgtccatttgacccagcaatcccattactgggtatatactcaaaagaatataaatcattctaccataaacatacatgcacatgtatatccattgcaacactattcacaatagcaaagacatggaatcaacctaaatgtccatcaatgatagagtggataaagaaactgtggtacatatgcaccaggcaatactatgcagccataaaaaaagagcaagattgtatcctttgcaggaacatggatggaggccattatccttaaccaattaatgcaggaacagaaagccaaatgcttcccattctcacttataagtgggagttaaatgatgaaaacatggggacacatacaggggaataacagacattgggacctacctgagggtggagggtgggagaaggttagattagaaagaatagctattgagtactaagcttttgtacctgggtgactaaataatctgtacaataaaccctgtgccatgagttacctatataaaaaacctgcacatgtacctctgaacctaaaattaaagttaaaaaaaaaagaaacacaggttcttatcagctttttaatgcttacataataaatagagcacaggcatgtttcactgagtcctctgcttgggtctcagccaagctctaatccaggtgtctggctggctaagtttgcattgagctttaaccagagaaaagatccacttccaagctcactcatcttatgggcaagattcagttctttgcagttgttggactgaaggcttcaatttcctgttgttcagagaccacctcagctcctagaggtgcccttagttcctgccacgtgggttatccaacatgaccacgtgccttctcaaaaccagcaaagcagagagagagagagtccaacaaaactgatgttaaattttacattattgtaatcatggacatctggccacctttgcggtagtcagttggttagatgcatgtcacagatccttcccacactcatggggaaggaattgaacaaggtcatgaactccaggatgggggcggcttactgaggccatttgaagagtctgtccaccacaaatataaagctgggaaaggctataatataccagcgaaaccaaaacaaataaatagaattttaacatgtaaaggacaaagaaattattctgggaatagaggaaattgtcaaaaaattattatgaatttgtacattcttaaaaccaaaacagcatgatgtaaaagaaaagcaatcaaaaataagaaagcacatatgaaaaatgttaatccaatagttgaactattttaataatcaatcataaataaagacaggaaaacttccaagacagtagagactcatcatgtttctaatttttttcatcaacatattcaataaaaaataaatagagtgtatgcaggacttcaaagttatgatggtaaattctacaagaaatgaggagtgattaattatctttgaggaattgggtgggagtgagagaaggataagctgttttatgatatcttttaatagtagatacagttcttaaatatatgattatattgctttaactttaaaaaaaaatagacaatgacagtgccaggactttaacttcaagaatgaaaaacaaatctaagagaaccatagaatggcattaccttgacaaatataacctgttctatattttggctccctgtcctatggattcagatccctggcttttcaatgaatgcatctgtagtagtagactcacattaatcaatgtaacagagactgatgtataaaccgtaacactaacttacaatttatagtgaagtacacaatcaccagagaccatttttcttcatagagagcctaggaatccaaactataatcagagaattgcaatggtagatctgggctcacaacaagggagtcagctggataaatgggatatatggaatcttttgatggaagagtcttgtttagggtatgggaatatttatcgtccttgcccctagactaagtttctataggcccagccaatctttgtctctgtgaccctccttttactctgcttacttggctgataaaattggcccttcatttacacacctaattgattaagacatgacatcattcaggtcgttgtcaagttaagctttcctgggcactactctgtgtcattaagaaaggtttgcacatctttgccctgatcagctacttctgtattgtaaggtttaactctcagggaacaatcgtagtttgactattttcaagtggttaagaaatcattccactattttcccaaagtaccaaaatagatattaatagaatattggctaagataaccctgtttccaatattaattgattagtctattttaaaataactctgtttagaactactttaagttatctttaattaaaaacagaggcttttactctctacttatttgatagtgattaatgagcactttaaaagtgcttcatcttcctaagaattaagctcagaaaaaactctaaactccccataaaataaagagaagaaataaattattttctcagctgctatctcctcaaatattgcttctgtccattttctttcttctctcatcctgaaactctggtcctttcgccatgtatttcaagtctaatattctctcttgtctttctcatctttagtctctgcttgcttaaatctggctattttcttgtggtctatcttccagtttaataattctctcttcagctgtttccattctgttgtaaaacatgctccttgcatttttaatttgttattgtatttttcagttctagaatttctttttttcccccaaagctgctctaacttccacagatgaatatgtttggtattctattaatattttaaatcttgtttttcatatccttgaacaccataaacacaattattttggagactgtgtctgataattattttatttagggtgcttgtgtgccagatctttctgctagttctaagttaggttgtcacgtctcctgtgcttctggcaatctttgataaaatgccaaacaagtatttaagagattgcttagaaacaatttgagacttgataggatgttgctttctccagagattattttcttttatttcagccaggtgcctggagataccatcaatctgggattaccttaatacaatttcagtggtgatattttttagggccactcaggtgtcttgaagctgagacaagtatatgggagaacaggtttacctttagttcctccttactcctcactcaaaagagttgggatcccaactcagtttcagggttttatgaaggccttaatcttggcagaacttggactcctgcacttgacttcctgcctcatgagggagccaaaagtgttgctcggcttcccagcctcctcttcctgaaaaagcagaaacccccagacacagccagcacccgatgccagctgcacttctctagatttctttcttttcctagatcttcatccagacagtgttaccaccttgttacagctccaattcctttaaacacttttaaaagacattttattcagctttagagttgttttcatttggattattgatccaaattatctagtcagtccaaataactagaggtggaaatcacttaaaactctgatgaataaagatgagtgatgtgtcctttttccatgaatacatttctccaagcctcagttttaaaatgttccatactttaaatatttacacttcagtttacaatctataaccacccactttaataaactcaaagtccaaagtgttaattaggactcacaccacagcagtttttttttccttgccattcattcaacattcttgcccataacctgaacatcctcaaacaagaaatggggttcattcctaacaagaaaaacacttagatggataaacagttgtgtctattcagatgggacacagctcagagttttaagagagggtttgtaatatgaacacactcatgcacagctctgctgttagatgtgggttgtgtaggatcatgaggaggtctttggcttttagcatggcacagttagtctttaccagatgtggggagtggggaagagagggcttgaagtggatgtatctgatggtaagagatggtcacaggccatgcctctccctaatctccctcctctctgcttacagaaaacccatgcctgctccatgaacccagcttttcttcaccagccattggcagcatgaatccatggcatgcaaagctaaagggggtcaaaggttggaactgagatctggggtggggtacaataaaagggcttggctgccagagtaaatgctcttctgaagtggcgaacagccatattaggaggcggtctgtttctgtgatgtcaggagaatagctttagcagctgtgattgtgcggtcagacaaagctaggagagattcctgtattcaacggcatttcattttacaatctataaggtgtggggccctaaaagggaaaatataaaaatgtgggattgccattcaattcaagggtctttaggactcatgctaaagcaaagcccaatctagtgaaagaagcacagagcaggtggagagctcagacttccacaagaagacagaggaatcaatcaagtctctttcctgaggactttggctgacgacttgccctttgcttaacttttggggtccatgacatggtgcctccatgaagaggtttagaagaaggccagcacagccagcagctggaggagggacaggggggattttggggagtcttcgagccagatactgagagggagaaagagaatttggattttaagtagtttttctgtgtgctatggaatagcttgttctgttttatgagaatgtataaagacatacagagcttcttcctttcttcctgtttacttttagtcatctgccagtgttttctgaataccaaaccttgtgaagatgagcgttgggaaaggagtaggaaggtcccaatttggaattttgacatcctaaaagccttgggtgccgcagaatgagtaagctggagggtactgtgtaaagacctcggctactgcagcagagaaacagatcaaaaaagtcaagaccggcgagaggaaagtgattgaaaggccatcactgaaagaggtgacaagcttggatttggcagggcaggagggatgcagagagggacggatgtgagagtccacaggaagaagccttctgattgaaagggtgcttggctgtggatgtgagggacagaaaggggtcgaggctgtcactgagatcctcagcttcagcaaggggatgcatggtgccttaatttactgtaagaacatggaagaggcacaggtttagggggcgatatggagccccattgtggaaatgcagggtctgaggagtgcctggccttctgctggcgctgcccaggagagcactggaggagcagacgtggcctccgggagatgctgagccagggctgaggacatgagatgcgcagggagggcagacactcccaccaggtcagaggagagacagggaggccagccctgccaaagccaggcctcagtttatttgtagagtgagagcttgaatttcaggatcacaaaaggttttttccaagagccaaaaggacttagtttctaactgttctcctccctcctttttgtggctgacaatgaacaacctaatccccttcctttctgaataattctccctgcccagtgactcacccaggtgcagatgagacacagagctcatggttgcctcctgtgaagtgcaggaaggatggagcagacagacccaaaagcactggcctcccagatgaatcaggagggatgtgcaggctgggtgacgtctgccccggaaccaggaaagtgcggctgcttcctccacaccccgcccgccgcccaggacccagggcccttctgaaaagtgagcattgtgttgttctttagacttattttatatgaaagcacatcacgctctaagaagagtcacccaggctttctgttctcaggtggagcctccctacaccctacgcacacggcggctgttccccacgacacagcggggggcaaatgaccaccaggagccagggagtcccagggaaaggacgcagatggctcgtgtcctggaatttcatgggagccatttgaaatcatcagcaaatgacgcccgagtctataagggacctcagcgcaggggctggatgagacagggtgggcagccacaaaacagggtggtgaaggcccgaggccaggagggctgggttagcactcggccaccagagggaagcaagcaagctccctccctctctctctttctctctgtctatgtgtctttctctctccctctctgtctctctccatctctctctccacccacacctcctgaggattgttgggttttcccatggactagggttagacagccagcgagtctgaacggaaggcgccaggtgtggcagtggggaagtgaggtggggcctggaacacaagggcaagggcctctgggaggaccgcgcaggctcggcacactgagcggactgactgcagaccctcctcccacaccagggggaccacctctctgtgcaaagatgtcctcacttgatattctcaattctttgaggtcaaggttttattaacactccctgaaaagtgggagagcttagtgataagactgtatcatttttgcaagacacaaagcaagcacagctggatggcatgtgccagctccctcaccatgctgagcacttttactcacatctcacccctgcagacagatgccagtgtcctcactcacccactggggcagacattattagttgccaatgcaagacccatttcctcacgtcctaactaatagaaccccaactgtgtccaggcaggtgacgtgcccagctaaaaatactcaccttttcagactcccttgaagttagtagcggccacgtgatacttccaacaaataagacatacacagagatctgctggggcttctgtgaaaacttttacttccctgaaacgggtaccaccttccttctcccattctttcttcctccttgaagcacagaagcaatgcctggagctgcagcggccattttgtgattgtgaagcaatgacctgaggaatgaaggccaacatcaaggatggcaaaacagagagaggaaaagagcaattgtcccctgatggcatggctgggccactgccccaaccctgtgaggccatgtgactccttattacatgagcacaggctagtcggggtttgtgctatctgcaggtgaatgcttggagattgtacaaaagtttatactggaggctttggaattcaatagaagtagacctgggttaaagtcaggaggatattttggctgtcattggtattgttattgccgataaggacccacaaggccaccactaatggggcctccagaccagagccgtgctgggagttttcccttgtccctagagcctacgcttgtggccacattcctgatcatgaatgtgacatgatcatggagttctgtggggtttgctgatgagttgggcaccgtggaggcagaatctcggcttctctggaccccagctgttgtttatttgtttgatgtccttttgtttttactaaacattaggatgtcttccgggtctaaacttctctactcccagctcagggtggcacgatggccattagatggagttggaatgaggaggaagatatatcccactggaaaactttttctgactctgataacatgaccttgtatcattggggttgtggggaggacttccacatacatagaacactattttgatcagagaagtgttttatttttcttcctgttttacaagaatgcacactcagtataactggtatttgtatgaactcagtcaccctgaacccaaatattgacattccaggtgaattagtcctgcactcgggtctgttggctcacctcaggtgccagcatgtactcgggaaagagtgccaggcccaggtgaagagggcctggggctcctgaggacggctgcccaaagcccatgaccctgctcggcggggccccagataaattactggcgattctgtccgtggccctccctctgccagcactcagcctcaggccagtcctagtgctgcattccagctgatggaacagcaggacacacggccactgctctgctggacagccttggctgctctcgtgttcctgctgtggggcaggaggcagggcagagagactgaggtttgcaactctaacgacagagaaccagattgactgtgtttcgcccccagatctagctcagccctgctgggttttccactccgaggaggtcagcgccaaagtgttaattttgtatctctggctagaggcacagtgcctgcatgcagtaggcgctcagagtttgtttcattgagaatttttgtactatttgaaataccgacatacttttgtctttgaagaaaagggtcctttatgttatttaaatgcaaacagatacctggtgaggctaaaatctttcaggcacttggtttaaaacgcttcaggcttttaaaccattcacatcacatggtgtttggtgttcaccgtgggcacattttaggcagagtttgatacacacaacacacacatgccacacacaccacacacatatacacacacatcacacatatacacacacaccacataccacacacaccacacatatacacacacaccacacaccacacatacacacacacaccacatactacacacaccacacannnnnnnnnnnnnnnnnnnnnnnnnnnnnnnnnnnnnnnnnnnnnnnnnnnnnnnnnnnnnnnnnnnnnnnnnnnnnnnnnnnnnnnnnnnnnnnnnnnnacaccacacatacacacacacaccacatactacacacaccacacatacacacacaccacataccacacacaccacacatatacacacacaccacataccacacacatacacactccacacacgtatacacagaccccacacatgccacacacatgccacacaccacacgcacaccccacacacacaccacataccacacacaccacacatatacacacactacataccacacacatacaccctccacacacatatacacacaccctacgccacacacaccacacatgccactcacaccacataacacacacacacccccacacacacaccacataccacacacaccacacatatacacacacaccatataccacacacatacaccccccacacacatatacatacaccccatgccacacacacaccacacttgccacacacatgccatacaccacacacacacatatcacacaccacacacatatacacacacaccacacatatacacacacaccacataccacaaacgtacacccccacatatacacacaccccacactacacacacacccacacaccacacataccacacacatgctgcacaccacacacacgcagccccccccacacaccacacaggcacacacatcccacacacacacacaccacacactccagacacccctcacacacatacacacaccgtacacataccacacacaaacacccatatcacacacacacacacacactgcacacaaaccacacaccctcaccatacacaaacacacatgtgccacacacaccacactcacacacaaacaccacacatacaaaccacacacatgcacgccatacacacaacccacaggcacatacagacacaccacacatgcacacaccacacaacacacacaaacaccatgtacactacacgcacatatcccagacataccacatataaacacagcacacacaccacacatgcacaccccacatacacacataccatacacacaccacatgcacacatgctccccacacagacacacatacaatacaactcacacacaacatacacaacacaacacacacacaccctcacatacaccatacacacataccacacacaccccgtgcatacacacattacacttgtgcactacacccacacacatacacatccatacacacaaacgtatgacatgtacacataaccacacgaaccttacacccacatcccacacacatgccacacacaccacacacacgcgtgtgaaacaggccacgcttgaccaagactaagacgtcatgcatagtcagatgctccatgattttatgcacctctaagcaaaaatggcaactgccagctaagctactatacgtcctcacttggaaaatgtagccccagggctgggcgcagtggctcatgccagtaattccaacactttgggaggccaaggcgggcggatcgcttgaccccaggagttccagaccagcctaggcaacatggggaaaccccttctttaccaaaaatacaaaaaattagctgagcatgatggcatgcacctgcaatcccagctacttggaaggctgaggtgggagaatctcctgagcctaggaggcagaggttgcagtgagccaggattataccactgcactccagcctgggcaacaaagtgagaccctgtctcaaaaaaaaaaaaaaaaaaaagaagatgtatcccagtgtcacagatgtaaaaatacaaccttggctcaacgaaatatggtatttatttatctttcatttatgggggatgtcattttggagagatgagatttatacactgaaataaattttaaagcccagacaatccataacgatgaactgcatggtttggtgtgggtgatacatgtcatagggattctggagggagaaatgtcagctggtgctaagaagggtcggggaggtttttaaacaaaggtgatcttagcagagtcctgaagatgaagtcctggatgagaggaaagcaaggaaatggcatcgtggaaaatatcctgaaggatgtttcgtgggggttgtcctgggcagcaccatgctactgggagtgccactcacctggacaggtcacctggcaggtgggcagctctgcacaccacataccacacacaccacatcccatcccatcccatcccaccctcatcccatcccaccacttttgctgtgtcccagaggttttgacaggttgtgtcactattattgttcggttcaaaaaatgttttgatttctatcttcatatcattgttgacccaatgttcattcaggagcaggttatttaatttgcatgtatttgcatggttttgagggttccttttggagttgatttccaattttattccactgtggtctgagaaattgcttgatataatttcaattttcttaaatttactgagacttgttttgtggcctaccatatggtttatctggagaatgtcccatatgctgatgaatagaatgtatatgctgcagtgatagaatgttctctaaatatctgatagatccatttgttgtagggtatagtttgagtccattgtttctttgttgactttctgtcttgatgacctgtctagtactgtcagtggagtattcaagttccccactattactgtgttgctgtctatctcatttcttaggtctagtagtaattgttttataaacttggaacctccagctttaggtgcctatatatttagaattgtgatattttcctgttggactagttcttttatcattatgtaatgtccctctttgtcttttttaactgctgttgccttaaagtgtgttttgtctgatataagaatagctactcctgctcattttgggtgtccatttgcatggaatatgtttttccacccctttaccttaagtttatgtgagtccttatgtgttaggtgagtctcctgaagacagaagaaacttggttggtgaattcttatccattctgccattctgtatctgttaagtggagcatttagactagcatttacattcagtgttagttttgagatgtgaggtactgttcaattcatcatgctatttgttgcctgaatgccttggtttttttccattgggttagtgttacataggtcctgtgagattttttttaaggaggttctattttggtgtattttgaggatttgtttcaagatttagagccccttttagcagtttttgtagtgctggcttagtggtgaattctctcagcatttgctggagaagactgtatctttccttcatttatgaagcttagttttgctggatacaaaattcttggctgataattgttttgtttaaggaggctacagataggaccccaatcccttctagcttgtagggtttctgctgagaaatctgctgttaatctgataggttttcctttataagttatctgatgcttttgcctcacagctcgtaagattcttcccttcatcttgactttaaataacctgatgactataggcctaggtgatgaactttttacaatgtattttccaggtgttatttgagcttcttgtatttgaatgtctaaatccctagaaaggtcagggaagttttcctctattattccctcaaataagttttccaaacttttagatttctcttcttccttgggaacatcaattattcttagggttgggcatttaacatagtcccaaacttcttggagtctttgttcaatttttttattcttttttatttgtctttgacaaattgggttaattcaaaagccttgtcttcaagctctaaggttctttcttctgcttgttcaattctattgctgagacttcccactgtattttgcatttctctaagtgtgtccttgatttccagaagttgtgactgttttttatttacactatctatttgactgaagaattttcctctcatgtcctgtatcatgttttcaatttctttaagttagacttcacttttccttggtgcctccttgattagcttataatcgaccttctgaattctttttccggcaattcagagatatcttcttggtttgaatccattgttggtgagctggtataaccttctggaggtgttaagtaaacttgttttgtcatattaagggaggagaccacccctcatattgtcttatgcccaatttccgcctccaaagaaagaagaagtaaaaactaaaaggcagaaatgaaattcacaagcagacagcccagcgccacaccctgggcttggtagttaaagatcgacccctgacctaatgggttatgttttctatagataacagatattgtatagaaaagcactgtgaaaatccctgtcctgttctgttccattctaattatcggtgcatgcagcccccagtcacgtacccgctgcttgctcaattgatcacggccctctcacgcagatccccttagagttgtgagcccttaaaagggacaggaattgctcactcagggagctcggttgttggagacatgagtcttgccgaagctcctgaccaaataaggcccttccttctttagcttggtgtctgaggagttttgtctgcggcttgtcctgctacaatattgctagaattgtttttctggttccttctcatttgggtagactacatcagagggaagatctgggattcaaggctgctgttcagattcttttgtcccatggggtgctcccttgaggtggtgttctcccccttcccctaggaatggggagagtcaaactatagtgattgttgttgctcttctagatctagccacacagcggagctaccaggctccaggctggtactggggagtgtctgcaaagagccctgtgatgtgatccatcctcaggtcttgcaactgtagataccaacacctgccctgatggagttagcagggggatgaagtagactctgtgagggtccttggttgtgttttggtttagtgtgctggtgtgttagttgccctccagccagaaggtggcactctcaagagtacgtcagctgcagtcctgtagggaggaaacaaactagcctgaggtacacctgggtatccctaagtattcaggtttctcaggcagtgggcagggccatagagttcccaagagattatgacctttgtcttcatctaccagggtggatagagaaagaccaccaggtagaggtagggataggcatgtctgagctcagcctctccttgggcaagacttgctgtggctgctgtgggggatgggggtgtggttcccaggccaatggagttatattcccagggggattatggcctcctctgccgagtcatataggtcgccagggaagtgggggaaagccagcagtcgcaggcctcaccctgctcccatgcagcccacagtcctaaaggctggtctcactccctccgtgcactcccaatagcaataagtctatttccatgcagccggtgaccagggctgagaacttgccccagaccatgagcctccccgctgagaaagcaagtggactcacaggttttccatgtcccatggagcttgcagcgttgatcccgttccttcaaagggtctgtggattctctcagctttcctggtatgttcttgcggtagttcttagagcaaaagtttatgatgtgagtgtccacacactgctctgtctgtccgagtgagagctgcaagctagtcctgcctcctatctgccatctgaatcccctctattttgcagagagtcccaaaacctcaaaagtagagaagtcaacagtgcagccatcagtgtggctaaaggcccaagagcccctggcaaaccactggtgtaggtccaagagtctaaccaaaagctaaagaacttggagtctgatgttcgagggcaggaagcacccagcacgggagaaagatggaggccagaagactcagcaagtcaagtccttccacattcctctgcctgtttttatcctagctgcactggcagctgatgagatagtgcccacccagattgagggtgggtctacctctcccatcccactgactcaaatgctaatctcctttggcgacactctcacagacacacccagaaacaatactttgcatccttcaatccaatcaagttgacactcaatattaaccattacagtagcagatatataattttatatgcacgtgtatataattggaaatctttagaggttactagggcaacaaaaatttttcagaaaatttataaaaagacagaataaatcatgtgcttggccttttctataaaaataccaattcagggccgggtgcaatggctcacacctgtaatcccagcaccttgggaggccgaggcgggcagatcacggggtcaggagattgagaccatcctggataacatgatgaaatcccatctctactaaaaatagaaaaaattagctgggtgtggtggtgggcgcctgtagtcccagctacttgggaggctgaggcaggagaatggcgtgaacccggggggtggagcttgcagtgagccaagatcacgccacttcactccagcctgggtgacagaacgagactccgtctcagagaaaaaaaaaaaaaaagcaccaattcaggctaagtaaatagatattgaagaaaggttattctttatagaagaattacagctataaatgtagaaagaacaagagttagaaaatcgcttttttgcaatgcccagtggaatagtagttctaagccatgattctcatcggctgctaaactgagggtcgaaaaactgatggggacaggccagcacatctgagtcggggacaacctgaacacccccatgagggaggtacccaacacctcctgggatgtcttcttgtccaaaggattgaacctgcgtttcagcccttctgtggatctcccattttgcagaaaataccgaccatagcggaaaattttacacaacaccttacagacacaaacaggctagtccagaaggcaggaagctccttaggacaaataacaggatttcttcaataaataaatgtcaggaaaggatggggagagaattgctataaattaaaaagaactgaggagatacaccatccacttgcttcctatgagcctcgagccttgtttggattacaggtttgcaccaccacacccggctaattttttaagtttttgtagagacagggtctcagcatgttgcccaggctggtctctaactcctgggcttaagtgatcttcccacctcagcctcccgaagtgctggaattagaggcctgagccaaagcacctgtccctgtcttttttttttttttttcaaaatggagcttgcctgttgcccaggctggagtgcagtggcgtgatctcggctcactgcaacctctacctctcaggttcaagtgattctcctgcctcagcctcccaagtatctggtactacaggcgcgtgccaccacacctggctaattttttgtatttttagtagagatggggcttcaccgtgttagccaggatggtctcgatctcctgatcctgtgatctgcccgtctcagccttccaaagtgctgggattacaggtgtaagccaccacgcccagcccccctgtcttattttatataagcaaaacgggtggaacatagattaggtattagagaactgctgttcacagttacctgctgttagagtttcacacgtgtataagtcttgacagtatgtacattaggtaagtgtaataggtacatgtttctctacacatagatttttataatgtgcttatacctcatcagtttgcccatgttataaaataccttgcccttcttctcacatgcacacacagttctacctctttctttttaatgctcatgtattatttcactatacagatatgccaaaataatatcattcctctattaacgatcttcatcttgtttccttttgctgttgttcttgctattacaaagaacatcatcaaaaacactcttgttcatatatttgtgtgcaagcatttctgttgggctgattcctaggagaaaatatgtacatacttttctttttcttttttttttttaagatggagtcttgctcttgttgcccagttggagtgcaatggcataattttggctcactgcaacctctgcctcctgggttcaagagattctcctgcctcaccctcccaattagctggggttacaggcacctgccaccacacccagctgatttttgtatttttagtagagactgtgtttcaccatgttggctaggctggtctcgaactcctgacctcaggtgatccacctgccttggcctcccaaagtgctgggatcacaggcgtgagccatcgcacccggcctgtacatacttttcaaaagaagaagaaatagggtctctgaatgctgacctgcccgaggttgcacgatgagtaaatagtatgcaaagccaggcctatgtggcaccgaaagccgaccatatcttccatctccctcattgcatccgcactggagactcttccagacaatgctatccattgacctcaaaggccttgggaggggctgcagcatcccacttcactgacagcaaatatccaaaaactgcaatcgctgaatctggggattatgagcctctcctgtggttgagtgatatttttttaagttgtcatccagtacattgatggagcccataaaccctcactcagcatctgaaccaggtccccggcagtcacaaggtggcagctgcatgagagacagtggatggcagcagaattcctctccagggattgcacttggtaacacacaccggccacacccaggggcttcactgtcgattccatcgaatccaggactctggagatgagaggacaacgatgtcacttgagtaggtggcccccagagaggctcgcctgtcctgtccacttctaaggggcagtggggctgacctgaaataagaagccttctttttggtatctcccctgacctgttttgtctatctcaggtgaaggaggtgttgcctagcaactggagaagggcaatgatgtccttggaatattctgttcccgtcattgcgatacttaacctggttgatcattagcacaaagactaaggaggtggcaacctccttccagaaaaacgagttctgtaaagtcaccatgggaccgagaggggacttctagtgtggctttgggaaggggtctagctggcaccagatttttcggttctcagaaagaacctttccgctgaagtcggtagcattccttggtcaagtggacaataggtgttaagaaactctttgaaatatgagccatgccatttactttctatctaatctgtaaaactgcaatgcaaatgtgatatttgttggcatgtctctctggacttttatagcctttttactttgtaagtatattaagcaacagcaaataatatctgtaggtcctatgatatagcattaatgggctttctatgtccttttccatagaatgtgttaatcatttacattttaactaagggttactgctgacaccgcggtagaaagacttctcaaagggccatttctattactgggtaaataatcctagataagcctttgctcaccctgagactcaagtagcttggaaacttgaaggtatgcccttgggaaagttcgcttggccgccctcctcccagagtaaaccagcaaaaataagagtgcttgctcacacaaaagagactcagggtgctttccaagggctccaaagctcatggttctaggtttgagatagagcaagggttgtctttgctcagtgctacaggacaagcctcaaggatttcatccaccctgcaagtcacaatctctaaaaagtgaaggaaaagaagttacacatattactgctccctagggaaccacggtagagatgttggtgtgatttctttaaatcctttttctgtagtgtgtgtgctgctgagtgctggggtaggggaaggaaacttccttattcttttgataaatttgtggccgtgttgttggtacaacttggcatcctcctttttcatatatgagccttgtttgtgatatagacatctttgcagaacaaattgcaagggcggcaatgataggggagtgaaagtaatactatcctcacccattgccaagttcatggctgacaccccatcacaaaagacggattaacaagagaaaagcataacaaaggtatttaaccgaagttttacataacacatgagtcttcggatatagagagcccaaaatacagggaaaactgtatttttatgcttagatttaatgaagaagggatagtcatgtaaaagtgtaattggaccaagagaaggtatgatttaatcataatgaacgacagggaacttagcaaggcctgtttcttcagactcatctccagggtctctgggtcttcattcctttcctctggatgtggggcaggacacctgtcacatgagagtcttcaggagagaaggaagggaggtcacggacagaacttcctacttctgtggttttccagcttcctccagcttaaaatactcagcatcccaaagtgctgtatttaggggtatcctgctccgggccctgacacaattgtcctcctactgtgaatcctggagatcatttgcacaatgcttcactatatatttgctatatcgaaaaccaaacactgcatgttctcactcttaagtgggagttgaacaatgagaacacgtggacacaggaaggggatcatcacacaccgaggcctgtcggggggtgggggtaaagcagagggagagcattaggacaaatacctaatgcatgcgggcttaaaacctagatgacaggatgttaggtgcaacaaagcaccatggaacacatatacctatgtaacaaacttgcgcattcagcacatgtattccagagcttaaagtaaaataaaaaatatgtcaggtgaggtggctcacgcctgtaatcccagcactttgggaggcctaggtgggcggatcacctgaggtcaggagttcgagactagcctgaccaacatagagaaaccctgtctctactaaaaatacaaaatgagccaggcgtggtggcatatgcctgtaatcccagctacctgggaggctgaggcaggagaatcacttgaatccaggaggcggaggttgcggtgagctgagatcgtgccattgcactccagcctgggcaacaagagcgaaactccatctcaaaaataaataaataaaattaataatactactaataatttgctgtatcaaagcaaggaggaactctaaaaataatgaaaataacaaaccggaatttaaattcaggcaacagcatgtactacctcaccaacactgcaaagctcaactgttgaaaaaggttttgtcataaaaaatgatgagttcatgttcctttgtagggacatggatgaaattggaaatcatcattctcagtaaactatcgcaagaacaaaaaaccaaacaccgcatattctcactcataggtgggaattgaacaatgagatcacatggacacaggaaggggaatatcacactctggggactgttgtggggtggggggaggggggagggatagcattgggagatatacctaatgctagatgacaagttagtgggtgcagcacaccagcatggcacatgtatacatatgtaactaacctgcacaatatgcacatgtaccctaaaacttatagtataataaaaaaaagagaaaaaaaaaaaaagaaaaaggttttgtctcgaggttccccacggctcacgtctgctcccctgacgtttcaggctggtgtttctgatccttttcctgatattctaagatgtctgacaggtgtggactttgactgcttaggtccaatgaccccaacactgggtatagacgggattccctgaagcggcttgtctgtcctccttttctccggcgggctccagctcccttctgggtgaaatcctggcatctccatcgtgctgtctctctggagctatcaacaaacagctcttgattaatagctgtggccacaataaccttatttccacagagacaaggacagagctgccggctccacaccaacactgtcagccgggtgtgtgctttggtatcaggtctcacccaccgagttgctggggttgagttgtgtctccaaaaagatgtgttcaagttccaacccctggcgctgtgcatatgactttattggaaacaggatcttcgcatatatattcaaggtaaactgcagtgagactggattaaggcaggccctggttcaggatgactgccgtccttataggaagaaggaaatctggacagaaacacacagggagaggccgtttgaagatggaggcagaagctagggtggtgtggccacaagccaaggggcaccgagaagctggaagcagcaggaaggaccctccctccagtttcagagcgagcatgaccctgcggacacttacatctcaagcttgtggcccccacaccaggaataaatgtctgttgttttcagctgctcagtgcatggtgttatatttgttacaacagcctcgggaaattcacactggggtgctaaagagggaatctgggagcagccactctgtgactgcatgcccttaacctaggcagtgggaacctgactcctattctcacacttctaataaagacatacccaaggctgggtaattgataaagaaaagaagtttaatggactcacagttcaacatggctggtgaggcctcataatcatggtagaaggtaaaggaggagcaaaaaggcacgtcttacatggtggcaggcaagagtgcgtgttcaggggaactgccctttataaaaccatcagatctcatgagacttattcaccatcacaagaacagcacgggaaaaacccacctccatgagtcaatgacctcccatcaggtccctcctacaacacatggggattactacaattagaggtgagatttgggatttgggttggaacccagacccctgccttttgggtctcctgggtcttggagggacagaggagagtgaaattcattggtcaagagtgaactcctcagggtgctccttctgggaactccagcagggtgggcctgggaggggtctcccatcttccttcctcccaactcggtcaacagcagtgcagttactcaccctcctaccttcaacaacttctctccactcatcagagcaagcctgtggagcaagcagggactagggtccctgcatctctgggcactgacccctgcagaccccagacaaagtctccatggctcaacaccagcagaacaagtccaagaaagagcagcttcatcagggagtgggaacagcctgggcaactggcctgggagtgggcaacatcagggagtgggcaactagcctgggagtggctactccccaattaacctgggagtgggcaacatcagggagtgggaacaacagggagtgggcaactggcctagcctgcaggacaccctgtggatgtgcgtgtgtgtggacacatgtgtgtgcctgtgtacgtgtgtgttagcctggcctgctgggtaacatgtgcgtgtgtgtggacatttgtgtgtgtgcatgtgtcttagcttggcctgctgggccaagtcctgtgtactaaggcacctccttcccaggccccagctgccccgccttcatgtcccactaggaacccacaaggacaggatcctagaccgtgatgcactctgggataggattcaaactcacccctcgactcagggtcagggtggagacccactgttgccatgcctaggccgcaggaacatgacacacaatgctggttctgccccaggatgacagcctgggacgttcctggagtttgtgctttctgggttggaggtgggcgtggtcgttgtcttggtgtcccatgcagccctggggtatgacaggaggaaggagaagatgaagagatgaccctcaccaggggtgccctctgggtaccaaggtcatctccaaccccaacatgttttcttaccttcgccagtctagacttgccctccatgggtgtcagtgggcacctacagtgcagagacagaggtcagaggttccccagagcctaacagatggccaagggcatctccttgtcctgcagttactgtctgtcagaggctgaataatggctgccaaaagatagtcacatctggatacctggaactgtgaatgtgatgtgacatggcaaaaaaaaaaaagactttgcagatgtgattgagttaaagattttaaggtggggaaattatcccggattagccaggtgggccctaaatggcattgcaagagaccatgtgagaggaaggcagaggaagacttcactgcagaagaggagacagcgtggccatggaggcagagatgagggcagtgcagccacaagccctggagaacactggtagccaccacaagctgggaggtgtagggaaggaccttccccagagcatccagagggaccggccctgcccacaccctggtttcagcccagtgaaactgactgtggacgtctggcctctagaactgtgagggaatccgtttctactgttttaaaccacccgttttgtggtcctttgtcaccgctgctgtagggaactcctacaccctctcccatctggtggctgcgagccagcagagcttagacctgcacatgaggctctccgagtgcacagcctgggggagagccccaccgacagaaccgccgctgccatgtcaacctcttggctttctggctccaaattctgtctctcggctcttacttgttgaaccagagcaagaaacacagagaaaactgacttctaaaacatctgcatccgtgtgaggcaggcagacccttgtacttgtaactaacagaagaacagatccccagatggggaaaggactgatttatctgagacgctcgggtggtcgccaatgctaacaccggtgcacttcctcctggcattgtgcaatgtgtttgtcttgcgcttgtggtttgtgatgcctgtgtgcagggaggagcccagacagggcacatggtcatgagagtgcctcgagaggtggcttggtcattgtttggcattttgtcacctgtaaacccaggccaagagtcaacgttggctgggtggcaatggggttgttatcaagaatactgacatggtttggctctgtgtccccacccaaatctcaccttgtagctcccaaaattcccacatgttgtgggaggggcccggtgaaagatgattgaatcatgggggcgggtctttcctgtgcggttcttatgatagtgaatgggtctcatgagatctgatgggtttaaaaatgggagtttctctgcacaagcactctctttgcctgctgccatctacataagatgtgacttgctcctccttgccttccaccatgattgtgaggactccccagacatgtggactgtaagtccaataaacctctttcttttataaattgcccagtctggggtatgtctttatcagcagcgagaaaactgacaaatacaaataccaagagtagcagcatatctccagagggtagcagtgtccagaatgtgcaaatggagttagcctcaggccatatcgccacctccacagcccagcatcagggaaccacatcttggcacctgccatttccgcagtgagaacatccttcatccaggttgttatgtcaccagcgtctccttccttcataattgcacccaataccaccttcttcaggaagcccacttagagcaaacccctgcactttgagaaaggccaagatcatggctagtgatcagattgagcctatggcatcaagaggatggggggttagcaccaggctctgccctcgtcagtccctttaccttctctgtgctactagatgtgagcaggaagaccaacaggatgcacgtcctggagtcagatgtaattcacagaaggccttgagcacagggctggcaaacaagcagtgcacagtgggcatcagtcatcaccgctgtgtccagctaactccaccctgaatactcagggctggctgggtagcctctgggatgaccctcggtgatcgcctctcgaaatttgcttccttgtgtgactccttcttcatgagtggggctggacctggtgacttgcttctgatggacagaatgcatcaagagtaatggaacatctctgctctaggtgtcaaaaacctctgacttccttcttgcgggactctctctgtatggccttctcagcttgctcactttggtaaagcaacaagctgtgttagatccacatgtcgaggaactacacagacagtctctggctaacagccagcaaggaactgagaccctcaggctcatagaactggatcctgccagcaaccactaaggagcctgcagagggcccctgcttgcttaaaacttcagaagactgaggccaccacccactccctggcttcaacctggagagaggccctgaagaagattcagccgaagccggacactgtggctcatgtctgtcatccaagcactttgggaggccagggcggggagattgcttgggtctggtgcaacatggcgaatcgccatctctacaaaaaaatacaaaaattagccaggcgtggtggtgcacacctgtagtcccagctactcgggaggctgaggtcccagccgaatcccagctactcgggaggcggatcccttgttcaaaaagcatgaagactttacagatggcgacagcctctcgttgagcccaggaagagtcatctgagccggggaggtggaggttgcattgggccaagactgagctgaggatggagacagcagggctgggctgcttatccctgaaatacaactgggcctgttcagaaatagctgcttcaccaagaccctccaagtgttccccatggggccttcccaccatccagcagctggagggggaggtcctggcccgcaggtgtccctgggagcctgctccagcacatggcagtgtccgtctggctggtgagtgcagggtgccacaagtggtgagttattacgcatcctaccctggttaagcaaaacagccacaaaaaacatcaccagctctgccagcctgcgatgacccccaccccatgttagacatacccagtttgagaacatcctgtgtgtgaagacccagtctgacttctgctctacacctggtccctttaaacctattgtcacatgggagaagacaccctccagggtacatgttcaagctggttagggggcagagggctgggccttgggccgtgcatggtgggcatgtgacccctgtggtttccctgcacggctgagtgagcactcaggggctgtggcgctggctgcagggtcacgggcttggcaccttgttccactggtctaaccccagacaagcccacaggagacagcttggagtggctgaatatttgagaaaaagaaaatctggcttctatcccagctctgccactaattattcacatcagtatttgggaaagtcccaggacctcaccaggcagaactcctgcagcagtaaaatgaagacagttagctagctggcacctcacaaatctttcctggaacagagccccacctgaggcagaggaaagccaagttgcatcctgagttgtctcctcggaattgaaactgtcttcgaagacgtcgtgttatctctgaaggctgtggaatacagtcatcctgttccataaactgtccatgtttgctttaaaataaaaagaaaagcttggccccatgaccttgacgctgagaagacatccagtttggtggcttgtggtggggtttccccaggctggccccacactgccccaggctctttcagcccagcccttctgtccctccccttgggacaaggggttgaaggggagggtcaagggctcaacaaatgtcccatcctccactctagtctgtaacttaggggtcaagaggatgactccccggtacaagtcccagctctgtcgccactggctgtgtgacctcgggcaagtcacttaacctctctgtgcctctttttcctcccacagaaaacagagacaataatgacatccactcagagagttgtgaagcttaaatgagctgctatgcaacactcttagaaccaagctggcaggtgagaacgttcagtaagtgtgatgtgcgttttggttccttcttcctccaaaatctctttccctccttcctcccctgtgatcaccgctgcctttaaactcaaagagtcatttctcttccatttttattttacctttccccaattttcttctctccttactttctctccctcttttttgttctatttgtgatgtgaaaatgatccccggggctggcgctctatatggaaagcctcaaggtcacacgcccttgactactgggccccaagtccaggaacatggccttcccagtcatcaggagctcacctcgaacactgcgtgcagcgtgggggcacgtcggtgagagagagggggtgagagggaggggtgggcacgtcggtgagagggagggggtgagagggaggggtgacctcctccgggaagcttcctttctagggagatgcagggaattgggggtgggcaatactcagagatcatcaaaatataccactaagtaatgtatatgttcgtatgtcgtgcggctcctgtgtgccatggaggcttggcacacattgtctctaagtgggctgcactacatacgacaatatacattaaaacaatattttagccctgaaaatccttatttctgtgtgtagaatatcactctcctgggggggcctggagcgcccccttccttcacccatctcccagcagccccttagctccccagccccaatagagactaagtggtggtggtaggggggcgggtgttcactctgtgctgtcaagtgaggggtgcaggacccaaacccgtacactttgcctcatgctttaaaacagcgcatactgcctgcagccaacactgaaaagacaccagcctgttacaagagattttctctggatgttggaattacagggtcgattaggcttttctctgtcttttgaagtttcaggacatttcaggaggaatatgtatatataggttttgtataaagaaccagagccagtgagttcatacccacagcgctgacaccgccatggcagctgggacgccgtaacgggggtgagcctggggtctcttggctgtcttggagcaccacaggctggaggcatggagggggacaatatgcagagcctgggaccaaagggtagaaacggtggactttaccacaggggccaaggggccaataggggtgatgcagggagggcgggccatccccttgggcacagcgtggctacatgggcagtggcactcaagagccaaggaaggaagaccaggagaaaaggagggaatagtgggcagcccccaggggagcactgccagcctgcatggggtgacgtcagagacccagttgtggggccccctcgaggcctgccctgccgtgacgacctttgagcatagtctgctctgcagttcccttaaggactcagcaaagaggctgcagcaacctccccaatgtgagaggctcccactcggctctaaactagagtctttcccccggccccatcccacccctccaagaacctccttctccccgcagagccaaaactccccaagatgccatccatgctccttgtttcatgcgccccccagtgcaaaaactggagcaacagtccaggttttggaatttgccctgtttgagtctttttctctttttttctttttctgttttttgttttttgttttttgtttttttgggtcagagtcgctccctgtcacccaggctggagtgcagtggtgcaatcttggctcactgcaaactccgcctcccgggttcaagcaattcttcagcctcagcctcccaagtagctgggattacaggtgcgtgccaccacgcccagctaatttttatatttttagtagagacagggtttcaccttgctggtcaggctggtcttgaactcctgacatcaggtgatccacccgcctcagcctcccaaagtgttgggattataggtgtgagccaccgcacccagcctgagtcttttctttctttctttctttctctttctttctttcttttctttctttctttctttctttctttctttctttctttctttctttctttctttctttctttctttctgtttctttctttctctttctttctttctttgtctttctttctttctttgtctttctttctctctctcttctttcttctttctttctttttttttctcatttcttctttttcatgttggacagataatgtgcccagcagcaaggcttgagggaggcatgtcccacccaggaggatgaaagcccagtcatcctgctgatgtgtcacagggaatctgagcatttccatccccagctccctgctttccggtctgcagtcccctccctgggagctagggcaaccttccttctttctcgtctcctcccacccgaccagggtcctggcttctgagtgagggaagctctagaatccctttaggccagtgcgggacgagccatatgattgattcaaggggacccagttcaacgcgaacatgcgggtcccttgttcaaaaagcatcaagactttgtcaacggcagcagcctcgcgttgagcccagtgcccagtgccggctcccagcccaggaggttgacctcaggccaggagctgaccctaaaggaacagggaagagagggattcagctgccttggggactggggtgtcccaaacgagtgaagaccagctgtgcctgccagttcagagcaggcacagcataatcgccccgggagtggaggccgcagcaggatttggaccgggtctggaggttgttttcctccatctgcaaatgaggaatgtgaggccaaggataaagttaagttggtgcaaaagtcattgtggtttttgcattaacgtaataaaagctacagccatcaattgttgacagccaggcctcatgttttctttgtaacccacaaccctattgagggctgctcccgttatcccattttacagatgaggaaactgagtggctacgagtttccactcccagaaagagacggagctgggttagaacctggctccaggctgactctgaagctggtggtaccgccttccactgcggtgaccttccagactcccattcacaatctcttcccctcgtcagcccagcccctttcctaggctacaggcaagctcgggctgctcacgcaaggcctgcgggcaaagactggaggtgccaggctccaagtgggcagtggggctgggatggagctgtgtgcagggcgcatgtccaaagcccctgtacagtggctgggggccagcctcaggcccagccggccgtgggtgagcagagcaggctgcccttgcacacagagccctgtaacctgatggagcagactgctcttgcacaaagggccctgcaacctgagcctgttgactttggggaggagcccaagggagccgaggcctctgggcgcacacactgccggcaggggttaaaagcaagctggcccggatttgaagcgtgtggaagcctgacctgagatacggggagaagacaccagcagccccgggctttgttcttgggatgttttggattgggatttctcagtctccagttaaggaagtgtggggctctgtacgcttgaggtttcacagctattccctgagagggtgtccgttctcctcctcgccttcccctggaacatctctggtttttgcaaatggccccatgtgctgaggggtgaggcgggcactggctctctccctgtgtgcaggcgtcttccccactgtcgcaggctgaatggtggccccaaaaagacacatccaagtcctaagccccggtatcttggaggtgaccttatttgggagcagggcctttacagatggaatcaaggtgaggtgaggtcagacctgagtagggtgggcgctaagtccaaagactccggagaagcgacagacacagagacaggagaaaggcacgtgaaggtggaggcagagactgcagtgaggcagcccacgagccagggattacaggcgtgagccaccgcgccccgctgagaactgctttttaaacagccaactggggccagacgtggtggatcatgcctgtaatcccagcactttgggaggccaagaccggcagatcacctaaggtcaggagtttgagaccagcctggccaagatggtgaaaccccgtctctactaaaaatacaaaaattagccaggcgtggtggtgggcacctgtaatcccagctgctagggaggctgaggcaggagaatcgcttgaaccccagaggcggttgttgcagccagctgagactgtgccgttgcactccagcctaggtgacaaagcaagactcagtctcaaaaaataaataaataaagataaagtaaaattaaaaagcctactggccctttctgttcccaggagtccttcccttttaccctgccagtactgtacttgctgccaacatcctgtggaacgtggtgacattagcaaaagaagagagatggggcacaccctgcactagtcggctcaccaggcctgcaggagacccaggtccttcctcatctgcacccctgtagttcctcccaacacaccgagatgggttgtggagggaccatgggtccagcaaggctgaagagcggccttggcaagtacctttgttcttccaggacacaggaaaacaggctagaataggactgtgtaagagaccctttttgcaaacagcaacattgacaaaggtagggcagtcctgcctgtcctattttgccttttctcaaacataaggattccctgttgtcatggatcaaatagtgttcccctaaatttcgtgtccacccagaacctcataatgtgaccgttttggaaatggggtctacgcagatgcagttgtttaaagtcctggagaggagatcatcctggaatacccacatgggccttgaatccaaagactggtgttctcataagaagagaggacacagcgagacagacagccatgtgaggaggcaggcagagacgggaaggctgcaaccacacaccaagaatgctggggactgccagctaccaccaccagcggggagagaggctaggggtggtctctccctcggagctctgagaaggcaccaaccctgccaacaccctgattttaggattttggcctctagaatgatgagatactagttgttaattgttgtttgaagctataacgtgtttgatattctgccatggcagtcctaggggcctaacacactttggcattctgtctggcaggagatcccagtcaccccctacttttaaagccctgtgatcatagggtgtcagaggagcagcgtgtcttggagaactgctagtccagagtccctgtcctgtgttccatgacacccaatgtcccttaagagggaaagaggttggctcatgcctgtaatcccagcactttgggaggccaagacaagcagatcacaaggtcaggagaccgagactatcccggctaacatggtgaaatcccatctgtactaaaaatacaaaaaaaaaaaaaaaaatagctgagcatggtggcaggcgcctgtagtcccagctacttgggaggctgagtcaggagaatggcgtgaacccaggaggtggagcttgcagtgagccgagatcatgtcactgcactccagcctggtgacagagcgagactccgtctcaaaaaaaaaaaaaaaaatgggaagaggtgccccgtgagaaaacattccaggttcagtaaggtggggaccacctcgtatcagctctctgctgtagggaaatttataccagcacatcacagggtctgagacgtccttgaggaagtgaaaacaccaaagccagaggttttcaggacagagttccaacataggatcttttctttaacgcccactaatgtaccaaagacaaagagccatgagcgtatctagggagaaccgagcgtgtccgtccgtgctcgcactgctataaagaaatacctgagactggatagtttataaagaaaagaggtttcatgggctcacggttccacaggctgtacgggaagcatggcagcctctgctcagcttctgcggaggcctcaggaaactgacaatcatggcagaaggcaaaggggaccctgtacgtcacatgacagggaaggagaaagagagagcaggggcaggtgccacacccttttaaacaaccagatctcaggagaactctgtcacgagagcagcacttggggatgttgctaaccctttcatgggaaaccaccctctcgatccaatcacctcccaccaggccccacctccaacactgggattacaattcaacatgagatttgggcaggacacagatccaaaccatatcactgagctagtccaacatgctcaatgactgatgttgaaaccagccaggcagaagcaactcactctaagtcccaccgtgggttctagaactctggtctctcgatgctggtccacactgtaatatactgggaaaaaaaggaacactgggatgaatatctggaagatctgagttaaagtcatttattccttttttcagcacaaaggtgagcttcatgcaatggtataggatttaaatatggggagaaggatatgatggtaaatttcatggccgtttctatccagaactatttttctgggcacctgttattccttggtggagtggttgtctttctaggtcaggaagagagaacgtggcccagccaggcccagagcatggctgtgctgccagatcctgggccacgagcctcttgtggcaccttgtatgtgagacgtggctggtctgatggaaatgtgccttcggtgtgaggtgcacactggcttctaaaggcttagtgcagaacaaaggccgtcaaatgtctcattaatagtttctatattgttacatgttgagatcatgatattttggatatatacggttaaataaaatacatcattcaagttaattttactcgtttctttttacttttttttttagatggagtctcactctgtctctcaggctggagtgcagtggtgcaatctcagctcactgcaacaacctctacctcccaggttcaaatgattttcccacctctgcctcccaagtagctggtattacaggcgcgcaccaccacgcccagctaatttttgtatttttaggcaagactggatttcaccatgttggccaggctgatctcgaactcctgacctcaaatgatccaccggcctcggcctcccaaagtgctgggattataggtgtgagacaccgcacctggcctctttttactttttttaaaggtggctcctaggaagtgcagcactgccgccgtagctgctgtctgtggccccaacatgtttttgtcaggcagtgctgttgcctgggttcaggtttcctaacaggcttgacaaggtaggaaggaggggactcaccttggcacccttcaaggaccccacacagaagaaagatttcaccttgcccggcctggaagacttaaggtgcacgttcccaaagaggcttcttcatggtgttcacatttgggtaccaggcctagaatggggccactctaagagaggcagttaattaatgtgtctccagttaagatggcctggaagggagggggcaggcaagaaacaaaattcccattcctcttctctctccactcagatacagcatgtgaaacaggtgtggtccatatcagatgcagtacactgggcagggtctaacaggataagagtttcacgcaggacacgacagcattcatggcccacaaaagctttgggttgacgaccgttggggaacaaatctcgttaatcttccagtctcctgcaactggtagaagcagatctgtgtgctgcacttggtgggcggaaggctgtcgagccattgaaggagaaggactgtcttcaggctgttgaggcccctgtctggcctcgtgcagcatggagggtgtagtaacgggtccccaaatgcctgccgataggaggcagtttgtcaggtgtttcatatgctagaacaagctctgcttattgcctgtgcaatcgcacttactgccctaaagacctgggaataagttgaagagcctcttgcgattgcaatctaaccttcttttatggagtaagacattttcttgagctgttaaagatttaggtgtacagccctgtccagccaacgccggctgctaggaagcagggcagtgagagcagaaaggggagacatagcactttcagccagcaggggacagtgtggtacacgtctacgtgtccagtcccctaggtcctcggtcccctagcagatagaaggtccagaccaaccgccacagttgtgtattgagaaagtctggggggtgcttggggagtttgattgttactttcttagaggcgattgtcaatggtagaaggaacacaaggacttcaggtgatttaaatcctctgctttctaaaaaggattgattccctgtttcatggtccaaattacaggaatgcgctgagaactcctcatgggaggatgttaacagtcttgtgcaatataaagggtcattagaaagtaaaaaaggaggccgggcgcggtggctcacgcctttaatcccagcactttgggaggccgaggcggctggatcaggaggtcaggagttcgagaccagtctggccaacaaagtaaacctggtctctattaaacatacaaaaaaattggctgagtgtgctggtgtgcgcctgtaatcccagctacttgggaggctgaggctgaagaatcacttgaacccgggagggggaggttgcggtgagccgagatcgcgccattgcactgcagcctgggcaacaagagcgaaactccgtctcaaaaagaaaaaaagaaagaaaaagaaaagaaagtaaaaaaggagagataacaggatgggggcagtaagccaggagcaaagagaaaaaatgagaatggggttcatgagttaaggagggaattaaggtgcatgcaataaattataaattatacaaaagtaagttgttgtaggtgagccacctcaagaagaaaggtcttaagtgtaattccaggtcgtgagagctggacagtccctgttagctttgccaggatggatgtctgctgggacatctcagaaacttctccgaggcctgtctgtttacttttgtttatatttgtctaattatctttgtttagtgagtattacaaaagcatgacttacaagacaatgtcttccctcctctcccagggaatccgcccttgcagcgtttgtgggtagccaaggctcagctgaccactgcagacagcctccacctcccatacagaacatactcctgagcaaacaggtgcaaccactgaagcccacaccacatccagagagttgtttaaaaagagaagactcagaattctcactcaccttttagatgccattctctcagatacagcagcttcatccctttctttccttctgggcttccccttctgaacagcctcctgtgctggtgttgaagcccaaggagcgacctctcgagggtgctcaatgggtgtccttctgcctcaggattccacttgtgccttaagtgtatacgacggtgtgttttattgcactgtgttttatatcaccttaatttttcaatcacatctggaggcactctgcgtcctgtgcaaagggggttgggagtctcagtgtaaggcggaaggtgcaatggccacaggcaagatggaggccctgggcatggcaccttctctccagctttggcaacaagtgccagttcctcaagactgtgaggtgcagcccagcagctggggctccatcacatcagttacacatggcagctggggctccaccacatacatgttatgcatggcagtgggggctctgccaccacatattatgcgtggactggtctggttctctgcattgtgaagatgcaccgacatgcactcatgaccgctcacatcaaccggaaggtaagtgtctctctgtgattcctgtttgctagaaaccagcatatcctgagtgcaggacaaacacctgggctcagaactgaagcttccagaggagggagctctctcccccgtcttgactggtgtagccacacctgccacatctgcctaagaaggaggtcatgcagtctgctgtggacatccagaaacacagatcctgaagacaaggcaacgccccttctcagggaataaagggggcaggcggtagaactcccgacgcccacctctcatcccatttagacatgtgctcagtatccttaggtattcctgagggtgacatgaactgttctctgcctttgtctggggcattgcaacaataaaagaggcattttcttttcttttcttagcaaaactggcccctgccaaatgccttgagttcagttgttcaaatccctgccttcctgaagtgctgaaggggctgagtgtgagcaaagcaaggattggaggtcgagctctctagggctgcggacatttgggagaatatttgggtgggaagaatgaacagcgtcactcagaactaacggcagggggcagtgtggctccacagtccatcacagggcacccccccgccccaccgaccccgacagtgcccacagcccctgccatccaaccagggctgggcctcagcctgggggacagcttctgtgtagtttggttcagaatgtgtcctcataagaaaggcggcacctcccagattccttccctgccctctgccgggaagtcttactgccaaaacacccaggaatgtgtgtctgcctccagcaactttagctgcaggggctggacctggctttgatgctgcggcagctgatgggatcctggagcacagtgtgggaagctggctccttaggcctgggaacaagcccaggcaaccgggctgggactcgctctgcctggctgcctctcctacagcgtgcgtgaacgggaggccaggatggccacaggccccaggaaacgcagatctcatgggaagaggttgcagtttcagcttctggctgtggatgctccgggcaatttcatgcatttccatgagttcagagaatggaagctcccctggcccctccctaccactctttgtaaatcagctcgctccttctgttcattcatccgctcattcatccattccgcacacgtgccttattgaatccctgctatgaccaggcacagggttagatactccatggagaccagaccagtcttagcctctgcactgatgaactcaacccagaagacacacgaaaagataagccacggtgtgacgggcggacgacagagcctgcgccgagacacgggcacttcagcttgatatgtggagagtgtcggctgcaaacctccctggtctctgccgccagacgcatgccaagatggcctgattacactggggaaatttcgaatgggccattgaaatgcgtggtgtgattgttgccatggattttacggtctggtggcctgttccgtgctggtcaggctgacgtctgtgcttggcacagcatggtgagagacaggcaggtgtggttgatgcctctgggagggagcacataatccaggaaagggggcagtaaaccaggcgatgggaactgcaacggagcagaggccacgggagaagccccagcggggagcacacctgagagggacagtgggaggagcgaggcctgaaaccggaggaggagcagcagagcccccacagaggacagcggaaaggagacctgagtggggaagagctcggctccttccagtcccccagggacccaggttggggcagaggggccatcgggcctgtaaccttgcagtgccatcatggccctgggtagagtttgggtcttattctaggaagcgtgggggcttggaatgtcctggatgccacctgtttcctgtgtggcaggcagagtgaagaccccaccattccaccaagatgcctccaccctagccctattcgccgtgagtgcatcatatcacatgcagaggggagttggggttgcaggtggaactggattggtgaacaccacccttaacctaaggaggagatcctgggggatcccgcaggcccagagtcctcacagtgttcttaaaagggaactagcagccagaagtgtggcagtgaggacctgatccaacgtcattggctttgaagagggaggaagggcccatgggcctagaaatgaggacagcccctggaagctgagaaaggcgaggaacagattctgccctggatcctccaggaggagccggccctaggtcttagcccagtgagacccgtcacagactcccgacctccagcaatgcattaaatatgctgttcatgctgctgagtttgtggtcgtttgcaggaagctgatacaccctggcacaaactccttctcctcatctacactttagcacagagccgttaaataaatgcatgtgcctatgaacaggtgcattccaacagccctcaggccctgcgtgtgtgggtgacggtggagtgacaggaatgcaagacacagagtggtctgtgcagcctcctcccccgcactcagtgcagggtgggcaagggggatgctggcgggtccaccgtgtccaacagggagcaggcggcatctctagccaggctcggggccacagtgggggagtggggtttcagagtgaggcagatctggatctaaatcacctttacagaatggcttttgccacataaggtcacatattcacaagtcccagagattagaacaggcacattttgggggccatgattctgctcatccatatagagaacccccttattatttttcacaggtaaatagtattttatagtgggggagttctgtaaaggtttagctactcctctattaagaatatttggcttctggccaggggctcacatctgtaatcccagcactttggaaggctgaagccagaagattatttgaggccaggagtttgagaccagactgggcaacatagcaagacactgtacttaaaagatattttaaagaattttttttaattagccaaatgtgttggtgcgcacctgtagtcccagctacttgggaggctaaggtgagaagattgcttgagtcagtgagttcgaggcttcagtgagctgtgactcctgccatggcactccagctccagcctgggcaacagggaaagaccctgtctcaaagaaaagaaaaaggaatatttggcttctttccagtctttcaccattatttaaaatgccacaagaaatcatctcatgcacaatatcattttgcacatgtgcaaacagagctggagggcagattcccagaagcataagcgtctggtcaaaaggtggatatgcattcatagctttgctggaaattgccactttgcctccaatttgtactctgccagcaatatgtgaaagtatctgtttccccactgcctgcctaagggagtgtatgtctcacttttgtgttgttgccaatccagaagaagcatattgcgtagactttcatttgagactccatctttctgtgtggtttggcagaagactgggggaacattcttatactggctctaaatggaatgcaaggatactgcattaacttatgactcagtaaagtaatttattttggggagctaaaataatcagtttgctgctttctcatgatttttaacttgaagcaacatgaaactgggaaaataaaaatggatagcaagacttttagacaatgtctgttcagtgatgtttcaaacatatttttggcaggaactagaaatcagtccatgtagcccaagaatgatgccaattccatattctgtgttgctgattataaaggaagcaaaatgttccagtaagcagatgcaaaagcagccatcagctctcagatacaggagcagatgagctggagacgtcctcacgcgagcaccggccgctcttccccatgctgtgggcagcttgcctgtgggaaaggccaaagattccttaaaaagagattcaaatctgctcaagtgccaggataagcatttaatcaggagcccagcatcctgctccccaatgagtggggaagattttctaggcctggaaagtttttaagaggtaatgtgctattcttagtcataacaaatgaaagacaacccacatgtccagccaggcaggatggccaatgggctgttcagttgccagctgccttcccagccctccgggacagagtctcctgtgattctggcagcatccccaggacagagccctcaggaccaaggtagaaagcgcttgggcagggcagtggtctcccagtcagcaggcagacctcctgggaccacggggtcagatgtggggcctgaatgactcctgagtcacagccctgtcccctctgacatctcccactccaatgccatggtctggccacgtgccttggcttcccttcctacacttcagtggtctaagaggataattccaagagcccctaatctagctctggtctgcccctcgtctgaagactagattcctccactcactgcctaatacacctgggctccatcctgtgaatgaagtaagttgttcagagctacagtcaaagctgcgagcgggaattctcacagctcctgggatctctcaccagttccaacaaacttcccacctctccaagtcagactaagcctgagatgtgtaaccttcagcttagtctgccttaaaccagcatttcccaagcttacatttagagatcctctttttaaaaaaatcctgtggactcctaagtttttgttaaagtatttttattttactgctacttgtatgtgtggcaacactagaggacttacaaatatattacgttgatagctcttttagttttttgttgttttgttgtttcttttcttttcttttctttttagagacagtcttgcttgttgcccaggctggagtgcagtggtgtgatcacagctcattacaacctcaatcacctgggctcaagtaagcctcccatctcagcctcctgagtagctgggaccacaggtgtgtggcacattacccagccatgataggtcttatgtaaataaaaatcaaagagatttatcaatgaaattagaatacaacaccaatacatttcaaattaacaatgtaagcttaatttgatggattatgctattttgttaaaactgagtcaccaatgctgggttcacatttttaaaatacccatatttgtgttctatattttacttatagatttagtccttttgattttgagaataatgaccctcttttgagtgatggttgttattatttctcttttttaacaaagagctcagtttatcctctaatctattactttgatgatcccgagaatatgagtccactcaaaaatataataaaaattaacttgtagtaagaaaatctacactgtattttttttcactagccttattgttaatgagttgccgtggtttctaggaagagaggcagaatttacatatgtcgcctgtccctgtaggagagtggttccccctgctgcagtgcagggcaagactgtggggtctgctttccccaagcgtcatgtcagggtgaccagggcttgtttgatgtggtaggctacacagccttcattgattcatttggaccagatgccaacatgatcatggctacccagtgtgtgttttccagtgttgatccagtgaaagcagagtaatgaggttgcacggtgtccgaccactgaagaagttcacccaacgggtccaatcatgtatgtaacacacactcaagcacatgcgcagacacacacacacacacacacacacacagtgtaaacacagaatgaaagcactcaagacagcaccatgagccgggcgcggtggcccacgcctgtaatcccagcattttgggaggccaaggcgggtggatcacctgaggtcgggagttcaagatcagcctggccaacatggcaaaacctcgtctctattaaaaatacaaaaattagcctggcatggtggtggtacacatctgtaatcccaactattcaagaggctgaggcaggagaatcgcttgaaccaagacggtggaggttgcagtgagacgagattgcaccactgtactcagcatggggaacagagtgactgtctcaaaaaaaaaaaaaaaaaaaaagacaacaccatgagattaacctgtttccaaaaaagtgttaaaaactttgccaataaagacctaaaagtatgactcatttgctgatgcatataggactaaggagcgtgctcaggacacggatggagggctgagggctgtgttagggcctctacgaatgttcatatccctccttaatttgtatgttgaatccctaacccccaatgtgatggtacttgcagatagggcctttgggggtggttaggtttagatgaggtcaagagagtaggaccctcataatgggattagtgcccttataagaagagaaaggtcgatcgatcaatctgtctctgtgtatctatctatctatctatctgtctccgcaaatgccccagaaaaggccttgtgagaacctgtgagaaggcggccgtctgaaaacctggaagacagtcctctccagaacccaaccacgctggcaccctgatctcagacttccagcctccaaaacaaagagaaaataagtgtctgtagtttcagccacctggacatggtattttgttagagcagcctgagatggctaagacagagtataaactggcgcagtctttgggagagcaggttagcaatgtctaataaaattaaaactcttcagatccattgatcagcttctgaaatgtttccatcattacacaaagacatgaaagcatgtgtactgtgtatttatttgtgtgtgtgtgtgtgtgtgtgtgtgtgtgtgtactctctatttattacagtatgctttagaagagccaaatttgaaaacaacctgaacttctatcagcaaagtttttatcacataagctatggcacatctaccagtggaatacagtatatgacttgaaagaacaagtcaagtattgtacttatgtggaaagacgtttgagatatattgctatgcacgttgcaaaatgctaaatataacagcatccatggttgtttttaaaaattaacatctgctttaaaatgtggaagaacatacagcaaattgttaaatgatcagtttgggaggaggtttaggattatgaaagattttcactttctactccatagagatcgtgatatggtttggctgtgtccccacccaaatctcatcttgaattgtaactcccacttcccacatgtcatgggaggaacccagatagggggtgattgaatcatgggggcgggcctctcctgccctgttctcatgatagtaaatgagtctcatgagatctgatgcttttaaaaaggggagtttgcctgcacaacctctcttaccttgtctgccgccatatgagacgtgcctttcgccttccaccatgattgtgaggcctccccagccacgtaaaaccgtaagtccaataaacctctttcttttgtaaattgcccagtcttgggtatgtctttatcagcagcgtgaaaatggacgaatacagatggtgagaaagcacgataatttttaaattctctatcagtgtgcacagggtgccaggcactattctgggggctggtgatacagcagtgatggagccctacaggtcctcactgctgtgagcagatctttcactggaggagacaggcaattagcacatggaggtgtaatgaagaaagacaactgggtatggcactggagactaaagcggagatgaaggtttccgttcgagctgcttcctccaccctttcccacttgtctccagagggaaggaggagagagggcagattcctccccggtggcagaacgggaggcatcaattccaggcaggaagactgaggagcaggtatcctggttcagagaggtgtctgtccaacccctatgctgagacatgctctgtggtttgtggtctttggggtggccacaggacagccatctctaagggggcatttgagcagaaactgaaggaagggcaggacatagaaatgtcggtgtccaaaagaaagttccaggcagagagaacaggaaatgatgagtgaatgaatgaaccagtgaatggaggtcatcgctggccaaggagccacacacatgggtgagcaaacaccttgttcttccaccacaagccctgtctctcctgctatagctgtttagtaaaggggaggtgacttccctccccaccctgcccggtgtcatgggtctcaagttcatttccaccaggacagcacttggcacccccaaggccctcagcctgctgtcccgtctgagcctctgccacttgcacaaagggcaagggtggtgtatgcccctccagctccagggtcctgctcctgaggtgtgtggggtgccagttgggggctgcaagcctgactgcctccagctcagaggaaaacctttctctaacccacccagctggccccggaagtgcctggccactcttgatgcatggccaaccaagaagatggggggcgggtcccaggggtgctggtttgagggaagtccgaggcttggatggcacctgcccaggtacctctccccggctgcggccaccctgagccttgcagctgtcagtcactggctttgccaagggttagagtctttctccttccctttagtcttggtgatgtctgcagggcccagctgaggagatggcagtgggcaggggcagcatttggggccagtggtctatctactcaaatattcacgtgcatgtttagcaacaaatcaataaagaagtggtaagcccaagggacgtttcagtgtgtgaggaacaaggtcaattcctcttcttgtccccgttcttttaatctgcttccagattccattaggaaatcgatgatgaggtcttataaaaagaatttaaaacatattgcgcaaattaataacctctgttactttgtgaggaatcctttaaaaagcaacctttggctgggcgctcacccctgcaatcccagcactttgggaggccaaggctggcagatcacttgatgtcaggagctcaagaccagcctggccaacgtagtgaaaccccgtctttactaaaaatacaaaaaattagcctggcatggtggcgcacatgtgtaatcccagctatttgggaggctcaggcatgaaaattgctcgaacccgggagatggaggttgcagtgagcagagatcgcaccactgcactccagcctgggtgacagaatgaggctctgtttcgggaaaaaaaaaaaaatttactaagactgtattgtgtgctggatattttacttagattaactctgtgtctttcaatgccagataaggcagctgttcttatttaataacaggagccaatgactgggggagctggggttcaaagcctggtcttacccagatgtacaccaacacccgcctctccccgttggaccccgcccaaaagcagctgcctgaacgcagcttgttcagaatggtattggaaatccacaacccagacccgtcatcctggggaaccccaggacaagcacattccctcccccaaccagcttcaccccgaaggcagagaagccgggacagccagctcctgccgctctctgaacccatttttctacgagctgaggcccgttctcacaagcacaccaggaactcgggagagaggaattctctctggacaatccgggtcttctgggcaagcaagtcttcccccttatggagacaaagacggccactgggtctggacccctccacttataatagggccaggagggcttcggtctatatgattattattactattattacttctctttcttctttcctaactcagttacttagccagttgcaacaaggtaagagggaaggaaaatgtgccctgcctggttgattcatggataggatttgtgaccttctgctcggggagagcctgtgtatacaccatgtgagtgtcctgtcctaaaaaatcgtcacaagcttgggggcttaaaacaaaaacgattcatcttcccacagttctggaggctaggatcccgaaaccaagatttcctgatggaatctggaagcagattgaaagaacggggacaagcagagaccgctgggccctgctccctcggaaggctccagggtcgggggtcattcctcatctccccagtctctgatggcagctggcgttcctcggcttgggggcacattgcttcatttctgactctgctgttgcgtggctgtctcccctctgtgtgttttgtgcctgttctcctctttctgtaaagacaccagtcatataggatttagggctcaccctaatacactatgatctcattttaattaaattaattgtacctgcaaagaccctatttccaataaaggtcacattctgaggttccaggtggacacgaattttgggggacactattcagccagtacatacactgtggaggagaggcaagagacacccgaggcttggacacggtcatctcattcagcagacagcactgagcgcccactgggtgagaagcagggagctaccgcccaatcctgctcagccaggatgggcaggagatgggtccaaagctctcagagtgtggctgtaacaggagaaagcggcagtggaggggtggaacggcaccggtgaccgtgaacaaaacctctcccatctctcacctctgcggcactggcctccccagcctcccctgccagcgtgagctcacccacgaagctcatttctgagcagcccttcctggcctctgatctgactcaggactgcggaaaatccctcgtggctcagggcatgggcggctcagcccagggtggccctcgtgggggctgagtcagcagagcaggccgccgctgaggtggtgacactcacacgtgtgtcaccgttcatggaacacgcacaccgatgcaggcagacccagagccgggcatttgaggccaacttgaacaggaaggaaacacggtcacaacacttccctcactagaggtggttcctgggcggactgtggattcagatcagctccaatatttagcagttttaaagctataatttcctggaaaacgtactcaatttctctaagccttgtgcttctcatctgcagaatgggtacattcatccctaatccatagagctgctgtgagaattccatgagatactgaatagataccacgtatttcggacctgactcatgacaagaccaataacggggccattgtctcatctgttcttctccccatagtctttgcagagtgaacgctgagaatgagaactcctaacgtttttcctttctgtccacacaacttcacgatttaccaaaagcattttgtgtaatttctcttcttcatctttctcatgaaatgaaaacaacagttttctgcagctgaccctttcaccagagcttccaagctccccagagcaagaacccacataccaagctatggcagtcctggaccttggaaatcatacggccacatctgcagaaggagaaatccttgcagacggcagaggagctggtgcaatggcccagagggagcagaacaattattttttgaagaatcttgtctaactaaattatcagcactctctgtatcctcaacctttaatgaccctcagttctgttgaggtcagacaatgtgaaactgaactagaaagtccatttttaaaatctatgctgctataaatgtgataaaacccagctaccacagcaaggaaaagaatctcactgttttctggggttcctagctcgtcggagatgagtgggtgacttctcggctttttccttgatctgatgaaaaacctacccaaacccttccttgcttctgcacgaggggctgggaaactacagccctggccctgccgcctatttttgtaaataaagttttattggaacgcagctacactccttcacttacacactgcctaaggctgcttttacaagacaactgcaaatgtgagtcgtttccacagaggcctcatggccctcaaagccaaaattatttactgtatcatctggcccttcgcaggaaaaaaaaattgttaatttctgttctactctgagtatccactagttatctatttctctctttttaaaaataatctttgtttttataactgttttaggttttgtattagtcctttttcatgctgctgataaagtcacacccaagactgggaagaaaaagaggtttaactggacttatagttccgcatggctggggaggcatcagaatcatggcaggaggcaaaaggcacttcttacatggtggtggcaagagaaaatgaggaagaagcaaaagcggaaacccctgataaacccatcagatctcgtgagacttattcactatcatgagaatagtgtgggaaagaccggcccccatgattcaattacctcctcctgagtccctcccacaacaagtgggaattctgggagatacaattcaagttgagatttgggtggggacagagccaaaccatatcaggtttataggaaaattatgtagatagtgcagagagtctccccatattccttctccctcacatacattcccctatattcagcatcttgcattaattagtgtgctccattggatacaaccgatgaagcaatattgatagattattaactacagttcatagttcacgctaggtttcactctttgtgtagtacatttccataggttttaacaaattgttttatttcattcaacattttattgttactttttaattatgaaagtaagcacatgcctattataacaagtttgaacaatacaaactgtataaaggaagtgatggaaggttccccactgtactttctgggtcaatcctaacacagctgaccacgtgcccttcctgagctgttcccatgcacacagccctgacactcgtgggagtctgggttttttctaaacgtggaactatgctaggcttgttgcttgaaactcgcttttcccacttaactgtctcagttttctttctttgtttgtttgcttgcttgcttgttttgaggcagagtttttctcttattgcccacgctggagtgcaatggtgagatcttggctctccataaccagatgctgtattgaaggtatgtgcccatgtttagacactcaacacagcctgtccattcatcctgaagcacttctggtagcatttatgtgaatagagttctagaacttggactgtccaatcagaagatgtgaacatttttagcctggtgagaaatgaaacaacttggtagcattcacacacccatcctcctgcacacagagtggggacagggggtgcagtgtagatcccaaggcaccgggagcatgagaaggagagtgtacaggggttagggaaaccccaggaggcttcctggaggaggtgggttatgagaaggtgagctggatgcacagggtctgaaggagtaggggagggggtcatccagacaagaatcacctgagcaaagcctgggccctttacggatcccaaggtcaaggtcacaggctgctccttacaaatcgcatcatgcatatttctgctgaggaggaaaagatctggtagccaaggctgaaaatcgggtctagtgtgcaccctcagtgggctgggaggaggaagcactgggcaagaggcaccattgcaggcattcgggagatcagacacaggtttgctttcccgggtgcagccttggtggggtccccaagctgccccagtcaggagcagacagggcctcacagtcctgtccccggaagcaggaaaaaagggagggagaaagaaagagagggaaggaggatgggcaggggagagagaagaacgaagggagaaaggggagaatgcatcggccttcacacactccctagcaagacccagagagtttatggcaacatatcatcatagccccagactgagacagtccagaagagcattcacaatggaatcccacagcagagtaccacaccacccagccatgaagaagaacaaagtcctgctgcacagagcaccgggcggggatgggcacacagagagcctggggccaacaaggtcctcattgctctgtgttccttcccaatcccagtcccctccgccccactcctctcttttctacccagagaacttttgctgtaataactcttttgctttcctttataatttaccacctaagcatgttttccgaaatagaggattgctttttttctccagcaggtgtttctttttcttaaggcaacatggaggcagggcttgtcagtgctggccacaggggtctgctttgtgatcgctattgagttgtgttttggtttgtttgtttgttttgtgcacgttcttctatgtgtgtcgttatttaacaataaagaagtttctccacctttaaaagtctgaaaattgttgctttagtccactggctacattatacataaagtagatcagtgtacacctgtatgtactctactacatgcttagagagagggggacctaggtttactcctctgcacttacatgatgtccccatgtatgcagtgcagcaggtccccaaataacgtcattttatccaatgtcattgtattacaatgttgatgagacaaaagaaatcactccccatccaggggccactgtttgtgtggagtctgcacagtcccccagtgtccacgctagtgttctcctcttgcagcccaaactgtgcacattaggtgaattcgcaggtctaaattgtccccatctgagggaacgtgggtgtgggtgcgccccttgatggaagggtgtcctgtccgtgctggctcccaccttccactcagagttgccaggagaagctccagacactccaccctgaactgaaataattgggtacatagttatcttacttgttttttgtttgtttttctaaatgttttaaattgtcacataataattgtacatatttgtggggtacgtggtaatgtttccatccatatgatgtataagagagtgagtggactaaagcaatggtttcagactgttaaagatggggaaacttctctgagatggagtctcgctctgtcacccaggctggagtgcaatggctcaatctcagctggctacaatctctgcctccagggttccagtgattctcctgcctcagcctcccgagtagctgggactacaagcgcccgccaccacactcagctaatttttgtatttttagtagagacggggtttcactctgttggccaggctagtctcaaactcctgacctcaagtgatcagtctgctgcagcctcccaaagtgctaggattacaggcatgagccaccacgcccagcctaaagatggggaaacttctttattgttaaatatgacacaagtagaagaacatgtgcaaaccatttgatggtaaccagatcagggcaatgcacccagccctcatctcaagcatttgtcatgtgtttgtgtggtaacattcatatcctccctgtagctatttgaaactctatgatatattataattaaccatagtcatcccacagttgtatagagcatgatgacttattcctcctatctagctgtaattttatgtcctttaacaagtctctctctttccccctcttccccctatccttcccagcctccaacatcccctgttctacttttttgtttttgtttttttgagacagagtttcactcttgctacccaggctggagtgcaatggtgcaatctccactcaccacaacctctgcctcccgggttcaagtgattctcctacctcagcttcccaaatagctgggattacaggcatgcaccaccaagcccggctaatatttgtatttttagtagagacggggtttctccatgttggtcaggctggtctcgaactcccaacctcaggtgatccactcgcctcggcctcccaaagtgctgggattacaggcatgaggcaccacacctggccccttgttctattttttatgtctatgagatccactttttttagcttctgtgtgtgagtgacagcgtgcagggtttagctttctgttcctggcttgtttcactcagcatcatgctctccagttccgtttgtctggagtgagtgtggatgtggatctgatcctgcaatggaagggcattaccgtgaatgacaggatctcattcttacatatggctgaatagtattccatggtgtatatacgccccgtttttctttatccattcatctgttgttggacacaagccaggattccatatctcagctattgtgaatattgctccaataaacactgggagtgcagatgtcagcagaataaaactaggcccccacttctcactgcatacaaaagccacctgaaaatggatcaaagacctcaaaggcaagacccaaaactataaaactcctagaaaaaacaaaacagggaaatgctttaggacattggtctgggaaaagattttacaaataagacctcaaaagcacaggcaacaaaagcaaaaataaacaaatgggattatgtcaaactaaaaagcttctgcagagcgaaggaaacaatctacaaaatgaaaatacaatctacagaataggagaaaatatttgtaaagtattcatctgatgaaagattagtatccagaatatacaaggaactcaaacacctcaagagcaaaacaacaacaaaaccaattcaatttaaaaatgggcaaatgatgtgacagacatttccgagaataagacatacaaatggccaacacatacatgaaaaaaggtaaagaaggcagatttctgcctttctgtcacgggtggtgactagctagggctggtgtcgcaggtggtaaaggtatttgccaagagagtagtaggtaaagaaaggcagatttattagagaaggtatgagaatatgttgcaaggttgcaaggttgcaatgggctgtctacaaaaaggcaggggctggagggaagttttatagggtcatgctggaggggccaacaaaaggaggtcatgctgctggggccaccaggaactaggtcattgtcatcctgtcatccggttgtttgtgattggccatctctcagaataattgttcgttgttattccccacctggggcccttccccacctggggtccctcctgattgttgcttacttatcttatcaggactccacactttccctgatgagtgtccttggtgcctttgtcaaatatcggatcactatagatacatggattaatttctgtcgataatttgtttcattggtctatgtgtttgtttctatgccagtgccatgctgttttggttactataggcttgcaatatatttcgaagtcaggcagtgtgatgcctccagctttgttctttttgctcaggatttctttggctatttggggtcttttggggttccatacaaattttaagatttttttttctattcctgtgaactattttgacagagattgtaccaaatctgcagattgctttcaatagtgttaccagtttttaatttttcttaaatgtatgaaaagctcatatttgtttcgatgtttaatattagaagtgttttgatctttatttcaaaatttgggccaggtgtgatggcttatgcctataatcccagcactttcggaggccaagggaggaggattgcttgagaccaggagttgagaccagacctcatctctacaaaaatttaaaaattagctgggtgctgtggcatgtgtctgtggtcccagctacttggggaggctgaggtgggaggatcacttgagcctggaaggtggaggatagagtgagccatgattgtgccactgcactccagcctgggcagcagagggagatactgtttcaaaaaaacaaaaagcaaaaaaataaataaataaataaaaataagaccaacaataaaaatttggcgatgttttcgcgaccaaaaatatgccttaagaacttaactcttgtttacgtcaactaacctgtggtgaactggttgcattatatgtcattttgccgaaagtcacagtttccaagaacctatcaagcaagttaagtgaagacttactgtacatacctataagaaaaagcaacaacaaaatggggagacgccccgacacatgggggtacgcctatgtggaaggttgcagaatcgctgctctcaaagttccgtgtcaggccgcctaccctgatgctgtttccttgtccacgtgagtcagttctgcagaggcctggcctggcaagcgcagccgtgacttctcgctaatcttcctgagaagccgctccaccatccattcatccttaagaaccccgggtgactcatgacgctctgcacaggacagttgagaatttatggggcaatatgtttgccttcacaagccgtctaagcaatgatgagcaattcaggcagctatgattaaaaagaaaaaaaaaaatgttttccatcatccagttctcctgaagaagccaaaaacaccgagggcttgaagttgtgttgacagaatcttagccaactccttcctagggatttaaactgttgcaccatcaatcatttgcagaattcatggcgattatcatttacaaccacagtttgagagtcaaaatgatcaacctcagtcaatacctacacatgaattgatggtctcagtcatttgccctaaagctggaattctattttattttttgacctctccctctcccgaaaagacaaatcccaagtacacatatcaaggtgtggttcaatccgaggtccgtctccccttggggtgccaaatgcgtctgggggttctccctccctgggccggctccacacggtcgtggagcctaccttgccctgcccctcaccctgtcccctgtgcttccctctccctggaagcgaggcctgggctgtcccagggaaggatccagcaggagagggtggcagggccggcctgggctgggctgcagctgctgtcgtggttgccatcctcggcatgcgttcgctgaggctgccgcggtaaagcaccacaaaccggggacttaaagtcacagaaattgatcctcccagagttctggaggccgaaagtttgccatcaaggtgactgcagggctggtttcataggaaggctctgggagaatcggtccctgcctttctccagcttcagtggctccagcaatccctggctctccttggctcatggccacgtcactctctgcctgcatcttcacgtggcctcctcctctctgtctcgatgtgacattttctgtctccaataaggacactcattggatttagggcccactacagcccagtatgacctcttcttaatttcactacaactgcaaagagctgatttctaaataagtgcacattcacaggtactggagattgtgagcttgtctttttgaatatttctttttaggggacacaattcaaccactacatcctcccacagaggagagctgaggcaggtctggcatgggggcccaggcaggactggaggagggcaacagccagtgggggcacttggagaggccttgcccccacacagcaggagtgtgggatgatgtttaggatcctggcagtccatgagctcttggagggagggtggattatgtcctttcctgagagtgggtaagcgtggaggtggcacctccctggcagcagtgagcaggggcagatgggaagatgtgtgggaaagggttgctttgccgctgtgcctgcggggataccaggagaggagtggggggcagtggatgttcctgagctggccctgcggaagaggagatggggttaccggaagaatgtgtctaccagagctgctgcatgagggcacaggtgaccctctggaagagacaagggacaccgggtgtcctgccctgaggtttgggggtggggcatgattccacctgtaaccacagcgaacaagagaaataggcccagctatgcagctgatggcagctggcacagtgcctggcctgagggaggagctccttcaagcagtggcttgactcatgacctgggaagaggcagggggtgggggaggcatcaaaatagcgtttctgagctgcaggggggctttggtttgtcctgtgtcaggagtgccagaggtgctctctggaggattgaggcagaggcagatgagcgccagcccgcatggaggcaacgtgtctggggacacccagcggacagggcagcagccctgatgcttggagtccttgagcaaacatctcgatcctgtgatgagtgcacgacacccagtctctgtgtggttgatggggctgggtggaggccagggtgggtctcacctccggctcacaattgtttgccactgacttgtgaacacaccagcagtcaggagccccttcaggtgctttggattgaagcttagacaattcgctctctttaagaaaaataatataaagtcattaaatcaaagtaagatacaaatatgagttcctatttagaatgtgaataaatcaccagaaagtgttagcgccatggagattcaggtctcttcctctgtccttctgcaatctcttttaaatagattgaattctggcatcctctcctcacctacaaccctctatagctcccagaagctctgggtgctccctgggttggagtagattgggcccctggaacttcagctcattcgcttccaggtacagcccctgccacctgcaaaggggagggttatttcaggccaggtgtgggtatcaagggctgagctccactgtgggctcaggcagatcctctgtgccaagaggtttggaggctcctccacctgggcaccaggcccagctggaaggcagtgaccaacttcctcttgcacctgtcagccttcacttgctcccctcagacctaacgccagagaggaggactccctccagcagcaaacatgcaattacgtcccctccttctgacctagctcaagaactccactggcagctcattaagtcaggggcagcttgaaagtcgctgctctgaatgccacagttttatgtcacttgtaagaagggttgggggcgggtaatcacagccctctgcaccagacgaaaggtgcgcagggaaagggtaggtgtaattgggggcccctgcagctcctctccacagagcagagtcacgccccaggttagactctccccagaactgctagcctggccggggcctgccagttgacttggggaaaaggcagaggtggaggcctgggaaactgggaggctgtgggccgccatcctcagctccccaccgctcctgagcacccctttctccgtctgtcactctcctctcctgctctgtgcctgtacatccaagcctgggtcctgtgtgggctgctggggaagaggaaagaggggctcctccttctaaacaccccacacgtaagcgtggctgctttcagtatttcattgaattgcctgctacagtggggatttgggcaggatcccaaatatcttccttgtgtcccagaatcctgttcatttttctatctgtgcatccatccacccatgcgccatccattatccatttgtccatccatccatccactcacattgatccaccatccatcactctttcatcatctgtccatccatccactcatctgttcatacaccctctatctatttatcatccctccatcctttcatcgtccattcaccatccatcattcatctgtcacccatcggtccattattcatccatcattagcccaactgtccatccatccattcatcatccacccaccatccatcactctccattatctgtccatctgtttattcatctctccatctattcatcctccatccatccctctatccatctaccacccattcattcatcatccgtccatctcatggaaaagtcttatgcacctgctaacatgcatgccaggagctgcgcttgtccctgaagctacagaggcttttgagaccagggtcttgcccctcatggtgccactgctctactggggaagcagacagagcagattgaatgggcccagcgacagtcatggggcacaagcggtgccatgatcctggagcagccactgagctgcccctcctccttccttctcccggcctgtctcttagcagccctgcactcagagttgggtgcacccccaaccccactgtcccctcccctgctccgcagcctgggaccggttcctgggaacctgcaggtggaggactcatggccccaggcagggtgattacccgcctcacccctgccagtctccacaagacttcccctgaggcccagctcaagaatgcactgcatttttctcatctcaataaaggtacaaagggtacttctggagccaggaagccaagaaatcacaccctttcaggtgcattcttggctgctgtgttgaggattctttttagggggttggtaatgctgctttattggataatttacctctttgactcaggcctgaggaacgccagtccgccccctccatcctaacctgcagaaccctcagcctgtgactctggtaacaaggaggacctcagttaatcaaggcagggagggatgtggaagagcaggttgggaagagggaggcccacccagcaaggggggcagtgagataaggaactgagaccctgtgaagccaagtggcttgaagcaaagtggcttgaagccccacatggtgatggcagagagagtgctctcggggctgcagcaactattgatttcatcactttcctttgcaatgttggcttgtggacacaccagccaggtggcctaaggataaaccttggccttcaaatcttgaaattcaccctttcccagttccagctttgacacattgagtgacttagggggagtcacttggcttgccccagtctgggcgtccttgttttgaaaatgagtcggttacagctgtgagctcatagtgtgtcgtgagaaccggtgacttactaatgcttatgaattcacggttgggctctctgagagctcgggcagggcacaccatacaaggcaccaggccctcggggcggtgaggagggaagatcaggggagggaatgtttcccctgtgtgcccagccccgtgcccctctagggcctgctcccagtgccctgtgaccttgggcaataaatgttgctattaatggtacatctgtcttgcctgctggaacgtcaagcagtttcacagcatcaatcaaaggctttgagcttctgggagaaggcgccaaggagctccaaggtgttattagaagtaattgggtctgcaattggggaaaccttcaaagctgccagacttagtttactttacccactttctctctttcacctttctcctccccccactaccttgctattgccctcctttccctctgcctcctccaacaattctttctcatcctgtctcacccgcaagttgctctcacactttccctgccagcgtaagaaccacccccagcccccacagccaatagtctgattctacagtgatggaccctcacacaaccaggactggcaggaaccccggagagcatggaatccaaacctcaaaccagagaggtgaaggttgtccatccatccatccatctatccatccattcatccattcatccacccattcattcatccatttatcatccatccatctatccatctacccactccatcatccatctttttgtctatttatccatcatccctctatatatccattcatacatccatcctctccatttatcatccactgatcaatccaccatccatccatccatttatccattcattcatctacccactcatccatctatccttccacccactctaccatccatcttttcatctatctattcttccatcatccttctatacatccacctgtccatcatccatccaccagccagccactccattcatcatccatccatccatccattcatctacccactccatccaccatccattcatcttctcatccacccatccatcatccatccattcatccacccactccatccatccactcatccacctgctccatccatccatccactcacccatccatctattcattaatccattcattcatgtatctatctacccactcatccattcatccttccacccaccatccagtgctgactctgccaggcctatgtttcttctaaacatacccagataaagaatttaggcctgcctctaaagtctagtcaagatgcaaaaaacaggactcccctggtaggacaaatgtgggacaatgccctggcttcttacagggagccccttatcctgccctacacagccctgtggggcctttcttcattctcattgccctgactcacactccatgttgttcctcgcaggggttggggtgaaggggcagggggttgactccaatgctcccctccctgttcttctgacctcatgactcctgaatgctctctgctggggagatcatgtgcagacaggtaaatatgggtcctggagaaagaatcaaaggtgggggcagtttcatgagagggagttccagcaaagggagagtaagcagagaggaccgccagctctgctggtccctcctctgcccacagtgggttctgaggaccctctgtcatctttgacacacatcaaagtcctggggaaggcaacaagttcccagggagcaggaccgcccagagtggcccaggcactatctgcatcagaatctggaatcacagaggagcttgttaaaagcatgcatatgtctgggcccggccccttcgaattaggatctaggccaggcccaggaatctgcatgttaacaaattcccaatgttctttgtacacagtgtttgagaacagtggctccagaagctcagtgtgtggttgagggtgggatgttcccaaacaccctgaagctgatagtgccacagccttgcctatgtggctgagatccaggcacaacagaagggctcttgctaccgttgggtggccctgtggaggttcctcttcttgttctcaatcctgaacccaggggatgcaggagaagccttggatttgcaagggcaggggagacagccaggctggcttcttcctccactcaggacaagagccagggtttggagccaagccagccccacacagaaaaattcagagtgtttcgagcccatcttcagctccagccccctgctctgtgccctctcccctttcatctgcctccctgccctcagttccctcactgtccacctcgatcctcaccaaggggatctgtggagtgggacgctttgctttatgggtcttctatgatgtgctgggcagcctgccaggtgttttctataacaacccacttacgaagtgggctggccttcgtcccttcttcccttcctttttctgctctgccttcgtgtctttccttctctcttctttccctcctctcttcctccctctctccctcttttcttattttttattttttatttttttctgaaatggactcttggtctgtcgcccaggctggagttcagtggcacgatctcggctcactgcaacctccacctcctgggttcatgcgattctcttgtctcagcctcctgagtagctgggattataggcgggtgccaccacaccgggctaatttttgtatttttagtagagatgggtttcaccatgttggccgggctgctgtcaaactcctgacctcaagtgatccactcacctcagcctccaaaagtgctgggattataggtgtgagccactgcacccagccttctctccctcttttgtttctccttacttccctcttctcttccctccctctctccctctttctttccttccttcctaatatattttttgctgagtacctataatgtgccatgcatactctagaccctgcgaaaggactcacctcaaggaattcacattctcgacaaggggagacagacacaaagaaataagcaggtaaatctgggaagcctcctatggtagtaagtcctttggaaaagatgaagctggggagagagattgagagggtcagaattttaaattgggtattcaggtgagatttgagcagaggcctaaagaggtgtgggaacaccccaagcaggtagctgggagaaaagaaggttaggctgggagaccagtaagtgcaaaagtcctaaagcaggactgtgcttgtggcgtttgacaacagcaaaaggcatgtgacctgaggtcagagaagaagcagaaatgacaaactacccccacactgcacagctgaaaacaacccattttatttcttcatgagtctgcaatctgggctgggctcgtctgggcggctcttctgctggtcttgctggtggccctccatgtggctgctgttagctgggatgtcagctgggctggccagaatgggggtgctgggatgactggatttctctctctatgtctctccatgtggtcccagggcctctctcccttctgtggcctttctgtgtgttctctccatgaaacttttggcaggatagctggccttcttatgtggtggttcagagctcccaagagtgcaaaagtggaggctgccaagtcttctcaaggcttaggcccataagtggcacagcaccacttctgccacatttaattaattaaagtgagtcccagggtccaccacatttagggggagaggactgtgtaagggcatgaatgttcaagatgtgtgttctgcagtgggcaggtctatgcaaacctacctccaaagtctgaggaagctgagaggctgaagaaagaggctgaaaaatccagtttcttagaaagaaatatttatttattcattaatttttttagagacagggtcttgctctgtcacccaggctggagtgtagtggctcaatcatagctcactgccgagttaaactcctgggctcaagtgatcctctagcctccgcctccctaggagctgggactataggtgtgagccaccgtggtaatccagaaagaaacatttaacaggaacgtgtgaacagaagccatgtctatatctctgtcagcagcaagactagatggtggatccccattactcctcagacttacacagtgccagaaggaaggtgtaggacaattgtagggaaatttcacatatgcaagaatgctatgtgaatttgcctaaggacaggagttatggtcaaggttgttttgacctaagggtgagatttaagtgggtgctcttacacaacaaacagcagataacttagaaatcatagaggccttccggaactggggtctattcaaagtcagcatggtgggttggcatccaagctggagttgctttcgcctccacgtgtggttcccgggggccgggagcacagatcacggagggcaaggcccagcagcagagccttgcctggagacccggtagaaatgccagttatcaggcccaccccaggcctgctgcctccgaaccacgctggcagggattctggggttcctcacgctgccagctctctggctctctactgttgagaacagtgaatatagggctctgtagactgttgaaaggactttggctcttgctttgcatgaagttggaagccactggagaaatggcttagagcagaggtgtgctcagagaatccctgtgaatggggcagggcactcaagaccaggtgggggctgtggccaggacacaggtgagagcctgatggagacgtggcccagggtggcgtggaggggagagagagaggtgcctaggtggggacagttgaagtggagccactaggaattcccaacacatttgatatagactgtgaggggggccaagggtgctgaggcaggatcatgcctgcaatgttcaggaaaccgagaacactaacaggctagaagcagtgcagtggagagacggagcaagtgaaatgagtgttgcttccagctgtgaagttccagggtgtttgtcaccccctggtccctctcaggcctcagctggaccaaccagaagagtggcatttccactgcagagctaaggagaaagattgctgcaggtgcgggaggcagccaggagctcagctgggatgagttcaatgtggatgctcttaagacacgaacagctacgcaagtcgagaggtctgggggagccatacagccatggaggtggagcgctctccatcctagagatgggtctattttgtagtcagcatctaggtacctaaagtcttgggactagatggattttcttttcttttcttttcttttttttttttttttgagacggagttttgctcttgtcccccaagctggagtgcaatggtgcgatcttggctcactgcaacctctgcctcctgggttcaagcgattctcctgcctcagcctctcgagtagctgggattacaggtgcccaccaccatagctggctaattttgtgtatttttagtagagatggagttttaccatgttggccaggctggtctcaaactcctgacctcaggtgatccacccacctcagcctcccaaagtgctaggattacaggtgtgagctactgctcctagtcgactggatggattttctaggatgtgagggtggagaaaagaagacgtgagggaggcagcagagattgaaaaggtgtgggggtagaatgatgcccttgctgaggttgaattttttacaagttaaaagtatgactcttatgtaacaggagcatctgtcaatggtttatggaactcagtatggaagccagcatggtggcagagctggttcaaaaagtagaaaaagaatgaaagactacagtctctgacagaaggcatgctggaaggatgttgccagatcacagggccctagggtgcaataaaacagtccctgttgggtgatgatctattgttcagtaagctatcagcatctcgacaagacaaattcaactgtattgccagcagatagagtcagttgcatcactgtccattttcttcaagttaatatgaaccctggcagagatgtcaaatgtcccatcaatggaaaatagtcaaagcaagaggccgtgcccctgagataactagcggtctctgacatgccaccaccggttcctgagagcttgttaacaagacagtgtctgacctgagataaggaggtgaccatcgtttcaaaacagttgagaactaactcctgcatgttggttgttgctgtcactaactatagaagagaaatccacgtgggatcatctaaacctggcagaggttgcatggccagaatgtgctgggtcacactcaaactctggtctctctgacaccaaggaccacagatgctgagtccagccagcactttccaatgacctcagtccctctcaggacaggcccatccaaggaggatttgcctcaaggggaaagcaatgactagcccaaaaagaatgacctggcagggaagtgcctgggctgggggaggcacttccaataccctccctaaaatgcaatttttatccacttttctttgcacaatatttattatttccaaagagtgtctaaagaccgactacagaggagagattccagcccccttcatgctgcagattgttagagctagggctgcacgttccctgggacagggacaagcccatgttaggaggctgcttctcacggggagtgccctgagtgtggtggatgctaacattttgggtaatagaacaagacacaggctttcactgaatctgtcttttcagcaaaggtaaagaaaaaaaaggcagaaaggaaagaaatcatcctatgggtactgtgggagagggccaggaagagccagagaaatccacaaagttcaaaacggccagaccctatcaggttccccagggagccagcagcttatcacagcttagtcacagggttgtgagaaaacccatgcctcactggaaaccccccaaagaacaatgacccccttgatccaaatcacgtcgtggcccccggagtgctcagatcctatcatcaggaacacaatatccccatttcagggcctccgtcagaaggctggccggcacatccgtgagtcacagaacggaaaggaaggcagcgcgcatgttcatggaaagaaatcctgtttgtctctctcctttcttctgatacaaatgcagacagtttcccagttgtcaaaattgaacatgatacgaggaaaatagcttggtaaaaaacatgcattagtcattcagcagtaaaattttccaagttttactcatctcatcatcttgaccactaaatggactttcaacagtggatttctctgagagtggcacaagtgtgttaaggaattgtcacaggcatggcgcctgctctgagctctgggggcttagacccctcaaaagctcacagcccctggaattcactaagctgcagagcacaggggctactaaatatttctccaactggacagactttcacgtggggatagacaggattgaattacccagattcagagaaaaagggtctattatctcatagaacagtctgaagttcaaccaggaagccatattttccacttaaaaccacagggcagttatccaatctctgtgcaatttcatcagaggagaggtgagactgtcggggggcggcagggctgactgggaggctgtggagagggtgtgtttaggatgggcgacctttcctgtgggctaaggtaggaaagcagaaaacagttagtgtgagattcttggtgtcctcaagagcagcctgtgtaacagaaaagaccgttcttagttccttcacttttgattaacatcgaaggtattgtttcacatttctaatgtctagttttccttgggtttttaatagcactttcaggaagacttaattcaattaatgtttggccaggggaggtggctcacgcctctaattccagcactttgggaggttaaggtgggagaatcactttaattcagaagttccagaccagcctggggagcacagtgaactcctgtttctacaaaaataaataaataaataataaacaaaattagctaggcatgatataactagcctgtggtcctagctactcaggaggctgaggcaggaggatcacttgagcccaggagttcaagaccagcctgggcaacagaatgaaaccccatttctacaaaaaaaaaaaaaaaaaaaattagccaggtgtggtggtgctaggctgtggtcgtggctcctcaggaagctaaggtgggagtatcgcttgagcctaggaggtcaaggcagcagtaagcagtgactgtgccactgtactccagctgggcaacagaagggagacactgtcaaatatatacatatatactacaatggctattactacaaatagcttagaataactacagtgagggccgccgcagagactggagctctcacaccctgtggttaggaatgtaaaatggtataggcactttggaaaactgacagattcttggcaattaaatacacaataccacatgaccccatcgttctactcagagctatttattcaagagaagtgaaagcctgtgcccaagtgaagacttttgcataaatgttcatagcagctttatttgtaatagccaaaactagaaacaacccaaatgtccatcaacaggcgagacggataaacacatcgtggtatatccgcgcatggaaggaggcatatactttctgtcttgttgttggggtggtttcaggacatgcccatgtgtcgacacatgtcaaattgtacactctgagtatgtatagtttattatatggcaattatacctcaattaccttgtttaaagccttaaaaatgctttccagattagtagtaattggggtcagggctcaggggaaggtcaaaagaaaactttttagagtgataaaaatgttctatttcttgattgtggtgatggttacactacagctaccaattgctaaattacaatgggtggattttattggatataaattgtaactcaataaagctggggaaaaataaatttgcactgaaatatctttgcatattaggacaagggcagaatactgtggtaacatgtaatttttatttctaataaagcagacattgtagttgcagagaaaaaaattaaatttaaatttaaattttcatttctcttggacaaatatctaggagtagaacaacgaggtcatgcggtagttgtatgtttaattttcaagaaaccctcaagaaacgctttctcaaaagggaaaaataacatgtttacattgaagcaaaaaactaatatcttcttttttgtattgattatctgaatattaaaaaacaattacaagctgaataattattcttttttttttttttttttttttgagatagagtccccaggctgaagtgcagtggcatggtctcggctcactgcaacctctgtcttttgggctcaaacaattctcctatctcagcctctccagtagctgggactacaggcacgtaccagcatgcccggctaattttggtatttttttgtagagacagggattctgccatgttgcccaagatgatcttgaactcttgggctcaagtgattctcccactttggcctcctaaagtgctgcgattacaggcaggtgccactgtacccagcctgaataattattcttgatacctagtcacattctttaatcagttttttagccttatttgattctatcaccattagtggcattttttcagaagaatgcattattttcagagctatcttattttaatctctcataaaattgcctagaaacttctttaagaagacatttttgtggctaatgaatttgaatttgccgaccagctaagtggaatcttctccgtagaccctgaggttgtcagatgaatgagcatctgtggatgagctaactctgctcaggacaagacagtttcaattttttctaatggaaaggtcaatatttcaccgagatattgtcacagatcctgtgttctgacttcaatccaaaggatctttctttcctaagtgtctttatagggcaaattgggtcaaataggcttttttcatgcatgattcttttaaatattttgtcaaatttaggtgttaaaagtcataggccttttcaattttactccattctgatacatactatacatatatccaattaaaataagagctctacaaaatttgttccacacattgagacacttcaggaataaattttagaattccaaagtcactctcctacacggggtagacatcatgcattttactcagttcctctcttacttttgtggtgacaaatttaaatagtctttctgtttgcaatcttgtttttaataattgtaataatttgctaaaagtttcaaaagtttttagttatgtatttgttgaatggtttgattaaagatttcccactgatttggaactaaatgcaaggtaagtctagaagacccaattacgcacacacaaacacacacaaatctattgtaagtcatttaggtggatttataaactactttctctggggctgtgcacttctaaaatctaatgatggagcaaaaaggaagaaagtatatattgtcctgattaaggccttcttgccacttctattagcattgttgtggcaatgttgcattttagtacatgtaaaaaatttgtaagttttaatatcggcaactttctcttgaattagaggcgtattaaagtttaagactcacgcataaattatttgttcactaaaaacagttccaacttgatttctgctctatgcttttttttttgagactgagtctcgctctgttgcccaggctggagtgcagtggtgtgatctcagctcactgcaagctccgcctcctgaattcaagtgattgttgcgcctcagcctcccgagtcgctgggattataggcgtctgccaccacgcctggctgtttttgaatttttagtagagacggggttttgccgtgttggccaggctggtctcaaactcctgacctcaggtgatccgcccgccttggcctcccaaagtgctgggattataggcgtgagccaccgcacctggcctgctctatactttttaaatttgataatagcacatttctacatgatgctgtacgacaccaacatttgtatttgtagtatcaccataagaacaatgacaccagcaatattgaatagttaactgcaagttacatcttgcatttttaaaaggagccaatgatacatcttcaacagaacgaatgttcaaaagctttactttttttttttttttttgatgaagtttcattcttgttgcccaggctggagtaaaatggcacaatccctgctcactgcaacctctgcctcctaggttcaagcggttctcctgcctcagtctcctgagtagctgagattacaggcatgcgccaccacgccaggctaattttttgtagagatggggtttctccatgttggtcaggctggtctcaaactcctgaccccaggtgatcttcccacctcggcctgccaaagtgctgggattacaggcgtgagccactgcacctggcctcaaaagctttatttttatttaatgatttaataaaaattaagttattccaattaactgagtgggcttttctgttggaagcatctgataatacacatattatatccacatcacttaacggtctgtgaaatcctgctcatggaggtaacacataacagctatcacgtcatcgagtaaatcataagaaaactcgaagttgacaaagaaggaaattaatgagcactgacatttgatctacatgaaaagtcccagagtgacatggctgcaggcgtcagtcactgtctttggctgcctgaaaagagttaccagcttttgaggccaatgctgctgtttcttctgcttttcatgtgcttggtgatgtcactgcatttaccgcaaatggtaaacgttcacaaacattttgcgtaagtagacatcataatcaactttccggagaaacagaaatccaataacttaattttatattttgcatgcactttcattttattttttagttcaccatggcccaaagggtttatgacaagtgtaaaaatgtgttgccaaatggtgagataaatagagttatgccataaaatatagatagaaccaatcttgaatgtaataagtttcatatttcaatatctagttttccttgggttttgaagtttaccttacaaatcaactcattttatttgtcaagccagacaattttaatattattttcaaggagactcaattcagttaatgtttggccaggtgtggtggttcacgcctgtaattccagcactttaagagcccgaggcaggaagatgacatgagtccaggtgttcaagaacagcctgtgcaacacagtgaaaccccatctctgaaaaaaaataaacaaaattagccaggcgtggtggtacatcctgaggtcccagctatttgggaggctgaggtgggaggattgcttgagcccaggaggtcaaggcagtggtgagccgtgatcacgctactacattccagcctggacaacagagtgagaccctgtctcaaaaaaacaagattaatgtttgaacaaatggatttgaactactaaacgccctaaaggtatcgatcatatttacaaacctaataaatgaggttcccttaaacacgttaaactgcattgcaaattcattactgtcttctaaaattattgtaaatggttccaagaagcaataacacctccagtactaaagtcactccactaaatccaacaagtagagtttgaacaggtgaatgtccacgccctggactgtcccaacattgtgcaaaagctcagtaaaatgctcttatattttccacccaaaatcacaggctaaaaacaattgctcagtgacatgatttaaacccaaatcacaaggctaattcaatgtgtttttcctctaatgtgccaatttctcttaatatttcagacactttaaataccaaacatgcccagtatttttattctagacttaattctccccatactgatatttgtggttgacttactccatcattctgatgtttagttctaagccttcctcatgttaaaagactcttgccagctaagaaaaaaaaatgctgccttcccaggcagatgggggttcccgtcccctcctgaagttgctagtaagtgggtacttttaacttggacacaggtctctctctccctgatacacccgcagctgtgttgagccctttttagggtcaaaatggcaaccggtgaccaggaccccagaccctctgtattttcctcatgccccagttccacctggatggagcctgccctcccactcctgagactaaggtgtggcaccacacgtgaatgcacagggaacaggcagtgtccacacagctccttcaggagcaggcgcctgtcctcttttcctttcctgacttcttccagctggagctgtacccatgcctggggccacaggacggaggccacaagcccaccagagagggccacagcgcgggtggagttagagtggcttccctctggacctcgaacattctgacagctttgtctggctgcacatttacaacactaaagttgtgtggactgcaagaccaatgggctggaaacccaaagcaaatgcattccaagggagggtgatgtctccgtggatgtgtgaagctgaagataaggcacagcagcagggtggcaggaagagcagagaagtgttcatggctcaagatggccagtgaccagctgggccccgggggaggcagagggaagcaaagcgcagacccgtgtcccgtgtccggaggcagctgctgcacccagacgtccctgtccctcctgggaccaaaagtgtctcctagctgtgagtgggagctcaacataactccacaagatgaaacctgcattggggcaccagaatgactcatgtatgggacttgccgttattatgtcatcttttatctaattcagccaaaatcctgacttctttccaaaaatgtcttggttttttcaaaagtcccaagttaagccaggcgtggtggcttacgcctgtaatccctacactttaggaggccaaggcagtaggattatttgagcctagaagttcaacaccagcctgggcaacaaagtgagaccctgtctctaccaaaaaaaaaaaaaaaaatagccaggcatggtggcacctgtctgcagtcccagcttcttggaaggctggggtgggaggattgcattgagcccaggaggccgaggctgcagtgaaccatgatcacaccactgcactccagcctgggcaacagagcaagacttcatcaaaaaaaaaaaaaaaaaagtaccaaattaaaggaccacattcagaaattgttgaagtaagatgatttcaaaataaaataaaacattgtaaacagttgaaaaccaccaacaaatggacactgattgaatcgattagggtaaacctataaaatagaacattttgtagacattcaaaatgttgcggaagaatgtttaatgagggaaagtgttcatagtatgtaaaaaaaggctttattatagcataatcccaattctatataaacatttatttacagtttttaaaagctaaattttaaacaacaaaaacagattcagcattaaaagatgaatcataaaattaaaaacatatattaaaaacagtttgagtccaacttcgcctgactgatttctcatggttccctcggtggcagccccaggccgagtccgtcagcctaggttagactctggcggggcagaaggagagctttgcttcggtgtgctggggagcgagctcacttggcataagcattttttttttttttttttgagacggagtttcgctcttgttgcccaggctggattgcaatgatgtgatctcggctcactgcaacctccacctcctgggttcgagcgactctcctgcctcagccacctgagtagctggaattacaggcgcccgccaccacgcccagctaatttttttgtgtttttagtagagacaggttttcaccgtattggccaggctggtctcaaactcctgtcttcaagtgatccgcccgccttggcctcccaaagtgctgggattacaagtgtgaaccaccacactcggccggcataagcattttaagcctcctggtgatagaacttagaagatgcttactaattgcaccatctagcacttagaggataaaagatatttgatgtggagtctgaaaatctgggttccagcccccattcactgtccactgaccctgaacaagagacagcctgccctggacttccaggttgatggaatgagctacggtactattcctccccactcacagggctactgggagggtaaaactggactcgaggttgatggaatgagctaagggactgttcctccgcgactgttcctccgcactcacagggctactggaagggtaaaatgctcaaggtgagtgaagtagcttgcaggtggcaaagggcatgtgaaagttctttgggaccaggttttcacattgagggacattttggacctctgttatctcctctcctctgtcttcacctgctctctaaaacctggttacctcatggaagccaagcaggaatagctcgagactgcatataagctgcattgactgacttaatcctgcacccagcctggttccatcttcacttccagagaggtggtgtctgctggctctgttccacgcatctgtgcctcctccaagggccagaaggtcacacagggagcctgggagagaggttgtttgtagggcaacacctttctttggtttggttgtttagttaaacaacacacatcaccatggtgcgggcaaaacacaaacacgctattcctctattctattctcgtccattcccaaggcctacagccgcccacgagcagccaccaaggcacgcacccccaggctcccgagctcagaagggcctgtgcgtccgtcaaatctctgctgcggacgtcttgaaatccttaatactttctgaacgaggagctccgcgttttcatttcgcactgggccctgcagagtctgtcctgcctgcccactccttcagccaaggttccggcacatcgcagactttgtctggggctctgcagggctgaggctcatcaacaggagagaactttggagcagcagaaggagatagtagaggaacagccaagcaggtggaggattaggtctgggacacggagagggtgtcccctcttcatccccaggttcttccttccaaattgcaggaagggacgggttgcacatacttgctgcatgcactgcgttgcaaaaggccgaggagaatgagggggaaactgctccctgggattctgaaccccgccccccctcccagtggatggccagctgtatttctgaaatgcaaccaggggtgaaaagagattgttccatgtttgtcctcaaatacttcacagcaatgtcacattaattttttttcccttcctgagttccgtctggtttgcagccaaggaaaggaggcagagagggcgtgggcagcccacgggtccagcgaagcatcgctgtgtccgagaggccctgccagctcggggctctgggaaagagtatggacatgccctccccatgggcaccatcccttcctctgccagggagaacttcctcctggctgctgctcctggcaatggcttatttcctcaacacagtcattaaaaatcactcttagtagttcaaatttagaaacaggaactggcatatatcttattaatttctaaaatagtaagtacaaaaccaaagagaaacggaatttttacaacactttctccttatttcctaacaagcccaaatgcaaaacacaaatttatgaatggcaaaggcttcaaatcaaacctgatgatctttgacctagggcactgcccataatttgcagatgaaacaagagaggacagatcggagaggtggagtaacttaccaaagatcacacagccagggtgaggatccagttcttctagatcttgggccaggagaaaaggagagggagcctgactcaagctacagtcattgaggtcagagaaccaagggtcacaccagacatcacgaagatccaactagtggccggagagagtcactgggggtgataaccaggcctgtctcccagccagcgagggagtcagggcctcccaacagagctaagcggtgccaagggaccaggtcgaggacaaaaggtttatttgatgtgaggcattagcacctactagcaccttactgtagggagttttgttgcattttttaattcaaaatattttaaaaataattttattgagccgtaattcatatgccatagaattcacccaggtaaaccgtacgatccaatggtgtttagtatagtcacaaagttacacaatcattgccacagtcaattttatctttattattattattagtttttctttccaacttttgttttcggttcagggggtacctgtgcagactcgttccctgagtaaattgtgcatcgtgggagtttggtgtacagattatttcatcacccaggaaccagcatgagacgcagtaggtagcgttttgatcctcaccctccttccaccgtccaccctcaagtagactccagcacctactgttcctttctttgtgtccatatgtgcacagggtttagttctcacttctaagtaagaacatgtggtatttggttttctgttcctgcattaattcacttaggatcatggcctccagctccatccatgttgctgcaaagggcatgatcgcgttctgtttatggctgcacagtattccatggcatatatggaccacattttcttcatgcagtccactgttgatgggcatctagcttgattccctgcctttgttactgagaatagtgctgggatgaacatacaagtgcatgtgtctttatgatagaaggatttatatttctaaaggatttatatttcttttcttttcttttttcttttttttttttttgagatggagtttcgctcatgttgcccaggctggagtgcaatggcatgatctcagctcactgcaacctccacctcccaggttcaagtgattatcctgcctcagcctcctgggtagctgggattacaggcgtccgccatcaagcccagctaattttttgtatttttagtagagacgggatttcaccatgttggtcaggctggtcttcaactcctgacctcaggtgatccacctgccttggcctcccaaagtgctgggattacaggcatgagtcacggcacccggccagaaggatttctatttctttgggtacataccacagtcaattttagaacacgttcatcacttcaaaaagatgccctgcaccctctaggcatcacctcctcagccccaccattccttcccccagcccctggcaccactaagctcctttctgtctctatgaattagcctattctgggcgcatagatagaatcgttcagtatgtggccttttgtgtctggcttctttcatccagcatgatatcttcaaggttcgtgtgtgttgtggcatgtgtcagagcttcctgccttcttatggctaatgttccattgtgcagatattccattgcgcgaatatgtcctatgggtagatgctctgtttctaccaaggcccagcaggctgcccagggaaggggccctgtgaatggagtgcaattctctgctgcacctgtgctggccttgctccaggtctctagccgtcggccctgcaacaccctcgttggtcgtgctggaggccccccctgacatcttcctcttcctcaactacctctagggacgaggaacctgccaagtcctatggtcctggcaatagggttgcttgtgccagagcctcaacctgccacacatttcctttctttgagctctgctcaaagctagcagccttccacttcgcctgattggtgggtcagagaggtattccaaggtgcagcacatgctgccttcaaaatccaaaaaggctgccaagcactgtgcttccttcttaatggtaggaggtgcaaggtgcaatagcttgtactttactttggaaggaatgttctggcaggtcccaaaccattctaaaaaattaaccaatgcagctggcccctgaagcaatacagagtttatctactcccctttggaatgcacatgtcttgccaaggaattcagaatacaggacttgtcccttcctgctccttaggtctaatcaacatggggttcatataatgggccactgtggtgttctgcagactgtccgggtggtctgggtcaccaccagctatattgcaacagagcagaattaatggagtcctggggagagatggtgcatgtgtattgttgtctatctcatgtaaataaaaactgcctctgatccttctctctggtgggtattgaagccagatggttacaaatgtcataccagaggctagagtgatctctggcatagaccccacacccagcccaacagctgtgattggaagggtctactgtcgcggacatgacccacccagcttcggcaaaggctgggctggtgaattggatggtgtattagtccgtttccatgctgctgataaacacatacccgaaactgggcaacttacaaaagaaagaggtttaatggacttacggttccacgtggcttgggaggcctcacaatcatggcagaaagcaaaggcacttcttacatggtggcggcaacagagggaatgacagccaagggaaaggggtttccccttatcaaaccatcagatctcatgagacttattcactaccacgagaacagtataggagaaaccacccccgtgattcgattatctcccaccagatccctcccaccacatatgggaattaagggggtaaaattcaagatgagatttgggcagggacacagagccaaaccatatcagatgggaatatgatgacaaccaccatccctgtgttaaattaagtttatacattgcaaacaatgctattcactgtctcatataaaaatgaaatgtaggccgggcgcaatggctcacgcctgtaatcccagcactttgggacccgaggcaggtggatcaagaggtcaggagatcgagaccatcttggctaacatggtaaaaccccatctccactaaaaatacaaaaaaaattaaccaggtgtggtggcggttgcctgtagtcccagctactggggaggcagaggcaggagaatggtgtcaacctgggaggcggagcttgcagtgagccatgatcacgtcactgcactccagcctgggcgacagagcgagactcagtctcaaataaataaatataaataaataaataaataaaaaataaaaatgaaatgtagctcattcacactgccaaatctctctcatattctccttaatatttgatgatggcatgattccggttattaccttgactcattttgaaatgataaataatatacttaactctcacttcttctttcctcagttttgcacagtagcttgattctcctccgtgtaagttgatcagcgtttccctcgtgcaatttacttcatcttttctcacctccagttgcaccatttcttcccagtttcttactgtggtaacaatactaccacaaaattgaccatcttaacattgttaaatgtagtgtttagcaatactaaatacattcataatgtcatgtaacagtcaccccatctacctccagaattcctctttatcttttaaagctgaaatcgtatatcattaaataattgctccccatttcctcctcccctctgcccctgatcatcaccattctacttcctgcctctatgaatttgataccctaggtacctcaggtaagtgaaatcgtgcattatttgtttttctgttactgccttatttcacatagcataatgttctcaaggttcattcatattgtaacaaatgtcagaacttcctttttaaggctgaataaaattccatttttagtatatgccacacacacacacacacacacacacacacacggattaaaaaaaaaaaaaaaacactttaccttccagaacctgagttacaaccactgggtgggtcagaggacccaatgtacctgctgtgtgagatgagccgagaactggaaacttcatgtattacttcacctcatacaccctcaccctagcaaggagccgtgaaggcgctttgaatctctagatgtcagaattaattcagactctaaatccaacagcccccaaaagatctggacatgctccttttccagtggactacctgaaaaatggctccagggccctccaggaaaggcctggggaatcgctgcagcttttctcatggtgagattacggcatctcattgtggggacttggcttctccattccatgggttcctgctcaggtctggaaactggcaaaggactgtgactttctaccagtcaaaagatattaagaatgatggccactcattcttaaaaccttttgattttaaatattaaataatactctttttaaaaatgttatcttattttataaatagagacaaggtcttgctatgttacccagactggtcttgaactcctgggctcaagtgatccttccatctcccaaaatgctggggttacaggtgtgagccactgcacctggcctaaatagtattcttagtattaactgttgtatcagtcattgttccaccattgaaacagaatccgtaggaaatacatgtcgagagatttattgcaaggaatcagcgtgtgcgatggtggaggccgcctaggcaagtcaggaggcacaggctggaactctggggcacagaccaaagctggcatccccaagggagctttttctttaggaaagtctcatctctattcttcaagcctctgaacagatcaaatgaggcccacacagattccccaggacaatctcccttacttaaggtaaaccaacgatggactttcgtcacgttcacaaaacaccttcacagcagcaacgagacaacagtttgagtgaataaccggggactccagcctggccgagctggcatgtaaaccccccatcacacctgaccatctctcttctgggagcactacgttctgccatgcagctctccagattcctgcaggccaggagtctctggctgcctttctgaccttgctgtgcagtacagggatcacactgaccttgcttctgatggttaagggttgaatagtctctgccagtccagcagcccatcacccccactgctgccagggagttagttctgtaacagcatctcctatcatcatccacattctagagagaacagcctccactccgattcttggtagtgttggtgtccgcccaccccatggagtgtcccctgggcccttctaaggaacccagctgacaggttttccaacattccccagtagacgcattctagcacagccccttccctgagccactgtctaccatgcagggtgcaactattcttcacttaatgtggactgttggcttttccaagctttttagggccatcctaatggtgcattgaactttcccagggtccttctaaggtgtcaaatcctgtgctacagtgacagccttcatggcagtaaatttcttatccagctttcttttctgttgttggggaagagaaacctttccttctacccttataggtttagcaaatgagggcctgtgaattaaactgacaaaagacagattagcaagagaaaagagagagtatgtggggtgggggggcaccggtagtgggtgcttggtggctcacacctgtaatcccaggactttgggaggctgaggtgggcagatcacgaggtcaggaaatcgagaccatcctggccaacatggtgaaaccctgtctctattaaaatacaaaaaattagctggctgtggtggcgtgcgcctgttttcccagctactctggaggctgaggctggggagtcgcttgaacctgggaggtggaggttgcagtgagctgagatcatgccactgcactccagcctggcgacagagcaagaatcagtctcaaaaaaaaaaaaaaaaaaaaaaaggaaagaaaaggcagagttgatttacatgtccagcacacacacatgcagagtgctcagtggtgaggaactcaaagggcccgtgcctgcagtgtgaacaaaataccaagcaacagaaatttatttctcacagttctggaggttgaagaatccaagatcaaggtgatgtagggcagacaagcccaaagtggagcttagcctgtgaagacacttggttttgcccaggaaagaatttaagggcaaggcagaggtagaaggaaagtttcattgaagcagtggagttacagctccaggactgctcctgcagagtggagctaacccacaggcagtgagtagcagctcagggcagttctgtagtcatattgatacctacttttcattgcatgcagattaagggtgggttatgcagacattcctagggaattttgggtctttgggtcattgccatggaaaggggcagtaactcccaggcgttgccatggcgatggtcaactgacattgcacactggtgggctgtctgatggaaagctgcttccaccccagccctgttttagctagtcctcaatttgatctgatgtccaagccccacctccagagtcaagcctcacctcctacctccctagtgccagcagattccgtgtgtggtgagggcacgctctctgctttcaagatggcactttctgcctgcatcttcacgcaatggaagggataaggcagcctcttccacctcttttttaagggcaccaatcccagggatgagggtggggccctccggatttaatctcccccaaatccccacctcttaatccacaaggttagagattagatttcaacacagggattttggagagacacaaacattcagaccatagcatgtgcctaaattataggggaaagggagaaggagacaggtttctaaggaagaacaaagttgctttaggaaagacacatgggcttttagcaggacaaatgggagatgagaaagtgaaggatagagtttgtttatgcagatgtgagtgttcatcatggtcacaaaactcccctggagaaggaattcatagcaggtttattctggatctctctcctgggaggagaagccacctcaaagagggaattagggcacttctcacctcttagaagtttcttttagtgagatgagagaagttctaagaaggtttctttctgcatctattaaatctttcttacatgacttcagcttaaaagaatcttcataccgactctggggttcccaggggttccccaccctgtttccctggatccaaagccctggagactccccttcagggatggtcttctgggtcctgctccaggtgtcagccaggcagtgctgcgatttgaccagacacccagaggtcaggccaggaaggagagggaggcaggtgctgaggaagccaagatttgtcccacaagacaccgctataccagacccctttctacctttaagcagaagagagggtgagggtgaacgggggaatctatctttgaacaaggggcaggggaccacttttgcaagcccagagaattaggtggaatctggcgtttaaagacttcagatgcacctgcccaagtatttcccccccaaggcttggggtcccctccccgtgtctcagacccttgacttcagccccaagacagcctgttttcctctttgaaggtgtagctgcccacttctagcctttacaaccactattcccatgaccttccagccactgtgcctccctccactgccacctacccactcacccagctgaggggaagctccctggacactggggctgagaatcttctcatcccaggtgctgggaccctcagggccacccaactggcagggatcccacctggacagggtctcatctgcagagtctgcttcctgggaccccttccctagacccacagcctgagagacggattctcatggccagtctattgaaaagatgagtggcaatgggagggggccttgagcaagccgggggctgtggggaaggaaagagccgagacagcctctgcgtgtggtcacaccactgcgttgcccctcgctgaggaaaggggctgtggctgtaccccacatcaggcagtgaggccctggttgtaggctgggagtaagtggtcacttctggaggctgccattaggcccagaacactgctccaggtacagggatccgggtggggccacctcggcacgcacctgccctcatgtgggcagccctgattcctgggacagggctgaggttcagctttacggcagttggaggagctgcccccctctgcccccactccccaccagctattgcaaagctgaacgcctacagggccaggcaggaagtacagagtgcgccagcccccggggactctgtgaactgcagtgtgagcaactcccctacactgggaaggcttggcccagggcactggactggtcagatccggctgactcacaggtcaccagtctgcaacctttgccaaacactctcactccatcccgctacccggagccagttggcatcaccttggccatgccaacattccagggtagaagttagcatttccaaacccagttcatcggcagaattgcttgagacactttctttagactgtctggattttcttctctttttttttctggaattttttaaatttcagaagtaacgcatagttgatttcagaaggtcaagcgtgaaggaagaagcagctacgggaacattttgcagctgaaagcctgtcccccacaacctctgtagggcagctgcagatgcctcacacaagtcagtccattccgaagcaggacttttgggatgcggccgtgctcttggatggtccactcagtgctctctctcaccctctccaggatgtgctgagaaatggtagccttgggagacacccactgtgaggacctgtggctctagagccaggtgctctgaaggaaaacagcagaaagggatgcaagagtggcacgggctgggtgggcacggccgtccctttggggctgcctctttaggaggtgggagagggctgaggccagcggggagaaggagtcagcttcacccacggtgctgggaagggcagagggaacagcacggtgcagccaggcagggatccccaacgtcactgtcaggtgtgagccccaaggtgcccaatgtcacactgctgggaactgagcctccacaggcccttctctaaacctgcatccttctctgttgcactggagatccaggagatgaagataattagtattattagtgggtagagacaggggtctcaccatgttgcccaggctggtctcagactcctgggctcaagtgatccacctgactcggcctcccaaactgttgggattacaggcatgagccatggggctcggctgccaggaaataatttatatataaatctctcatgggccactgtgtagcacctgacatgttggtgctcacctcaaattctcaacatccttatcacgtggagacactgaagtcactaaaacatcccttgggggtgcttgccagggactcgggggacggaggaaaggggggttgctttacatggacacaaagttgcagttttgcaagatgaaaaagttctggaggttgtttgcacaccagtgtgaatatacttagcactacggaattgtgcatctatgattggttaacatagtacattttatttatgtatatttaccaaaattgtgtgtgtgtgtgtgtgtgtgtgtgtgtgtgtgtgtgtgtgtgtgatagagtctcgctctgttgcccaggctggagtgcaggggcgcgatcttggctcactgcaacctctgcctcctggattcaagtgattctcctgcctcaacctctctagtagctaggactacagacgcacgccaccacacccggctaatttttgtatttttagtagagacggggtttcaccgtgttggccaggttggcctcaaactcctgacctcaagcgatccgcccacctaggcatccacagttttttttagtttcttggagaagtgggctggggcctcctgatcccatctcagtaccatactccattccattcacatcatgaggatggatcatatgatgaggatcccatcagatcctcctgatctcaataccatactccattccagccacatcagtctaacccataaaacaagggaggagatggcagctcaaataagccaacaagcctgagcttttgcaccatccccgcaaggaggaatgccatcgtcccttaggatgcaaagtttctgggctcctacaaaagcctctgtccccagaggactctcttggcttcccgcccttgtggagggtcccgggcatcaccccaggacctctgtcaagagccagggctcccaggctcatggtggtccagtggccccctgcagttgtggctgggacactctgctgcgtgatgcagctggcgttcggtgtttgtagcaatggggtcagccttgcatggtccctaacctcccctggggacttacaaagtctctggtcccacatggcatctgagatctgcttcctaactgaggcagcttcaatttagcttccaggttcagtggccctgccgtgggacaggggctcacctacaacagtgggtggagcaatctgcagcaggatagaaggaggagaaaaaactagaagctgagaatgaatggaccccaatgcagcaaaatgctactggtaattgcattaacatagataatagcctgtagtcattcattcactccttttttctttctctcattccacaaatatttatggggctcctccctatgcacagcactgtgttatgcactgcagacttgaaggtccatgcatctgtgatgtctacttccctgaagctggcatcctccaggtggagacggacaacacaccagtacccaaaatgatggcaggttctgtgccgtcaagagagtcaacatggtgaggacgtcgggtgcagctgctggggacggggcatggcagcccatctttgggtccggtagtcaggaaggcctctcggaagaggtgatattggatctgagatccggagggtgagagtgatctttggaggggccgcccatgctcaggaaagagcagagacaatgatcatgtcatctagtatttcagcccctgttcatctagcttggctaacaaatcaccttgtgatatatggtttggctgtggccccacccaaatctcatcttcacttgtagctcccataattcccacatgttgtgggagggacctggtgggagataattgagtcatggggttttcccccacacggttcttatggtagggtctcatgagatatgatagttttataagaggaagcccctttcacttggctctctttctctctcttcgctgtcaccatgtaagacctgccttcaccttctgccaagactgtgaggcctccccagccacatggaactgtgagtccattaagcctctttttctctataaattacccagtctcaggtgtgtctttatcagcagcatgagaacagactaacacaccttgccagtgtttatccttagaggtgcattcctttgcaccagtaacggaaccattgatatttagaggatcaaagatgcaaccaggagtggtggctcacgtctgtaatcccagcactttgggaggccaaaatgggaggatcacttgaggtcaggagttcgagaccagcctggccaacatggtgaaaccctgtctctactaaaaatacaaaaatcagcccggggtggtgataggcacctgtaatcccaggtactcagaaggatgaggcaagagaatcgcttgaacctgggaggcagaggttgcagtgagccgagatcgcaccactacactccagcctaggtgacagggtgagactctgtctcaacaacaacaacaaaaagatgcaattgtaatgagctctgtgtagtctatgagcccccaaacactcacgtttgccaggtgtgtgtgtcaccacaagatggggcacaggggctgccctggcaggagggtcacttggagaaggagtaagccctgtggaggatccagtgttcatccaccctggggctaggcatgagagggtcctccaggagaggctgcacacagaggaggaaaacctgcagggctgacttgaagccgggacacttaaggagaagccccagtgttcacactgtaaaaccagccaggacactggcaggaacactgtctgggtgttcgggaacttcgcatttccagccagcatgtgaaggcgcgttcttccactttaaggtccgctgcagaagtggcaaagccatgtgccttgagctctgctcacaggaaagaacacgacaaagctaaggggacttcacaagggctgtgtcaaaagaggttcacttcccttctgtcagacgcggggcaaaggtcgggaaagtgtgctgctgtgactcactgcatgtctgtagctgatgcccaagccctcttgtttgtttcaatgtcttcatgcagagattgactttttaaaatcaaagggaccaacatgtcttctctgaaatccgcagggccaaggtgggtataattgcttacgggggaacctgacagtgcccctcagcagttctgattctaaaaactgtcacacgctgggggtgtcacccgcagagggagggggttcttgtttatccagcaagcgtgtgagtacgggcttaaatcgtgacgaccacctctccagcagcttgacagtcccccactggcaaactccttgaattttctggaggtcaggtaagtctataaaatatcacagaaacagcaggtgctaaatcagaggaggtgacaagaggccggaagggtttctggctctttaactcccttccagcaaaagggtcttgcgatccctccaccaacttcaagatatgaagataactcctcagaaggaagcccctgggtccggtcgtggaggcccagtgtgctgaagctgtgtagtaagccactcagacgggagatttccaacgccaggttcagctgcggctcagacgacccatgtctaacccgaccgggtgctgtcagcccctcccagcccaatctgctccttctccttcctggatccaccctggagctccgttgtttgattgtttttggcaggggacagccaaacagctctgtgaatgaggcatatcctgaacattttcagttttgtgggccatgctgcgctctgtcacgcgcctctgctgttgtcgtgggaaagcagtcctcaacaatgtgtcaatgaaccgtggggctggctttcaacccaatgctatgttcagaaaggggcagcgcccggacccaggcttacaggattaaactgactcatctggggccggcatggaatgtgagagggaacttgcctcacccacgggcccccatctccccatgagcagacatgctgggacagagggggggcttcatgctgtggcttccaggagcccctgcaggctcagacagggctgggggagcccagcggatcatgtggggccgccttcggtctatcagcatcttcgcagcttcctctaaagaaggcagagctgttctgctaaaggcaggcaaacagtgcaaaagctgccggcctcgatgctctttcggtccgcagatggcttctgtgactgcacctaagcagtggctgcttggacagggtcctcagacagcctttgtgattttgcacataagcagcggctgcttggatggagcgctgtcgctgggctgaccgatgtcgctggcgggagcccttgccccaggttttccctgtcttctgagtgacagcccccagggtccttgtcagccttctggggaggctccctccctgctctgccttagttccggagcacagggaaccaccaggttgcatggccccttccaggctggtatgtgggcagcctagcagcacctgcttcaggtccctgttggaacttggcacacagtgggtgggtggcggggggaggtttacaggttaccatggggtcctgggtgtcctggcagcaggcctgccccacccatgagtggaccccagctccctctggggtcgagaagcccgtgtcctcacagcacagcccctctgacagtcaaggaagaggtctcgtgagccgggtcgtgtgtttacaaacagcactggcatcttgtggagcagtcactagcctggcttacttcccgggcaggagggctgattgtgaggcccagtggtcccagtggttggcctggggtttgctggctggtgttcacagctccagctggagtagctcaacctctgcagaagatgggagaagggtggcactgggatcctcagtgtccactggggagggctgcccaggagaccttgggtggcgtcaggtcatcactgcccttccatccagggcacaaagctgcctggagactgagcaccgcctgaggctggcacgagggctggcctcacacacgtgacactcctcacacatggcacccctcacacacggcactcctcacacacacggcactcctcctcacacacatggcactccccatgcatgtgacactcctctcctcctcacacacacatggcactcctcatgcacatggcagtcccgaccccaccagaaaggcatcgagactccatcttaccctcagggaaactggcactcagtgaggcccagggccaggctgcactgcagctgagggctggagatctacacacccgaaggctttgctttcctcctcgcgctccatggcctccagttggggcacccatggaccaccttgctcccaagccaacctgatgtggggaagcagcaatggagaaaagagaatagactggcaacaggaagacttccccaaaggacccggaggggcctctctgggagaagcacccttcccttccggggctgtatctgaaggggaagtgctctcttagctgcaccctccaccatcccctgtgggccgcagggaggtggggctcctgcctgggctgcttcccccaagggaaagcatctgataaggtcataacagccccttctccagcctctcctggggagctccaaggatgacctcacctctgcactacctatgagtcaaggaaacgggcacagcctctcattctagaagagggaagaggcagaaaggggaagcacatgggttaatggcgggacccaggccttcgagacctccccaggcacagctgaccccatcctggttttgatgactgattgacaagcattcattcattcaacatgctttgcttggggacagacaccagattcatcagatgggactgggggtggatttggggtggggccagctcacggagagccttggtttccagggcatttggatgcttttctgtaaagaggggcactccgtgaacatgtgtgaccagagctgggcctgggcaaaggcatgagttttagccctgggggtacaggagagccagctggaggggagggggcagcccccaccagaagcagcctggggttcgggaggagatgtgttgttataaagtaggacttcctgaaccttttgtaccacagatgctgctcagagtgtttcaaaatagcatgtaggattccagaggaaactaatgatgttaaaacacatttgccagacttcaaaaaacaaagttagatatgatagtatctgagctctctatgagcacatttcattgcaagactgggcatgggatctagtgaccatcacacttttaccaccatgatgagtgaaaacatcacttctagacagcagcaacacctgagatgcaatatgaacctttctgtgacttcagctgggaacaaagtcacttgctagccaggaacgccattgcaagtggtttactttcaaaatagaaggaaattctaaacttcacttaaaggttggtaaaaatgagatgcaatttttttctcctgatttttttctcaagggaagatgctctgtagaaaactttgagaaggtcaggggcatgagaagccctgagatcagccagaagctgatgcctgagtatcggggtacagggggagccacgagggtgggacccacagcattggcatggaagtgaggaggctcctgagaccagttagttctccccggactgtcccagtgaggaacccaggacccaggtgaccaaatgatcagtgggcatcagaagtaggatggagactggccctggctcacagcgccatacttacccgagagagaccctgggggcagacccctgggcgaaacttcccaggacagccagacgtggagcagccagcaggtgcttccagaagaaatgaacattccaagccaaggcacctcccgccaacaccaccccccaaggcgctaaggatgcccagagccactccatcttgggggcgctgtcatttggtttcagaaaaccacattctgtagtgggtgccagggtgtcctcaagacttctgggctctggcactcgtcatctggactccttttcaaaggaaaatgccccaggcgaggtggggctagcatctgcccctcaccctgcggccagctgggcggccccacccagcctggctctaagacctgtgcccccacccctggagcctctgtcctgtttcacagaatcctcacagccacccaacactgcccatgcctacagcactgcatgcccccaacatagcaccccttgccctacacccacacacaggtagaatgtggggtcttcagggtgttggaggaagggaggggagacttgcagaggtgggggatctgagcccccatgcaaatattccctaccccctgacctcccccaaccttttaccccttctgtgatccccagactgcaggcggcaggatcctccaccccagcccccacccccactggcttgcctgagctgggcggccccgcggtctaagcattagagcgacctacctgtctcatcttgccggaaaactggggataataacgcttacctcacaaggaaggtgtggggattaatgacttaatgctgcttagcgcccctgtgggtctgctgagccagccaaggagggccggctgccctgggaccggagcccagcacttgggacttccggggccctgtaggagccggggtcctggcgagcactccccaggcctcacccccggcccaaccaatccatggccactgagttttccagccctgagagttcggtcagtgctggctctgactttggggattttctgaggaatgtttcattcagccccatctagaacatccctggcgttggagcagcagaatgctaagatgggctggctcagtctgggagccatgagcagagggaggaggaggcctgcggtgcttccacgcggggcctgagatgcttggagctcagagcaggtgagagtccagatccccaacgtggtgagattctggggtccaagctcagcaccccctcccatggaacatcctgctgcatctcagccacacatctagagggcaggcggcaggaggaagccccttcaggatgacacagccccccatggggcctctggcttgtcttctatggaagagttgctcccctgacctgagagccagaaaattacactcgagcagccggctcggggacctccgggaccctggtgaccgcagcaggcccagcaccagcattcatcagctactcccaggtgtttgtcaggtcaaaggagaacaaagctcccacgaaagaaaatcaggtctcctagacacaccccacccaccaccagagcatctctcccctcaccctgcccttcccatcgtgacctgcagggtggccagggtcccccaccagaacgcagctcatccctcaatgatcatccacacactaggggcttaaactatagaaatgtatttgctcacaactctgcaggctggaggtcgatcccaggggctgcagggctggttcctgaggcctccctccctggcttatcaatggcatcttctccctctgtgttctcacctcctctttttataagaacatacgtctgtgttctcacctcctctttttataaggacaccagtctgattgtatcagggccaccctcatgacctggttttaccttagtcacctctgtaaagaccccatctccaaatacagccccattccaaggccctgggggttggagctcccacacatggacttggggattgattcagcccacagcaatccccagcagagccctacacatccttcaaggagagcaggaagtccgcttcctccatggggagaggcgcccctgcagcctcagcaacgtccgtttagacctgctgggcatgaaaacggtggggctgggtgctgggtgtctagggaggaatcaggcagcacacccgcccttgaggcctccattcatcccgggctatctgttagcacacactccaggtgctggaccacagcggtgaaggacctgcggcctccacagcaagctctcccggattggcctgcgactccgggagcactgggtcgcgtcctacagttctcagaatctcccagccagggcctgcgtgcggggcgtgcccggctggttctgttgaccgagggtcagcacgcaggtgggcaggtggcttcccagcaccaagaagaggtgagtccagcaggtcatctgccaggttactgcagcaacaggaggtggagggggacagggaaggaggcgagggaggcggccggtcctccatctctgccgtccacccaccatgccctggtaggatcacaacatggccagcgtgagccggccacccttctgagtgagcatgtgtcccgtgagcctgagaaagagccccagagtctcccaggcagaggcatggggtgcatagggatatggggtgggccagtttgctcctcagaccagaaggggtgcaggattccccccgatcaggatcttggagaaaggtgtggacagaggaagggagggagggagaaatggcagctgccctgcagtgggtccagaaaacccccaggctgggctacattctgccttgggaggtggaagtcagatttgggtgttttttttctttatttgcctttctttcctttccttttctttctttctttctttctttctttctttctttctttctttctttctttctttctttcttctttctttctttctttctcttcttctttcttttttttctttcttctttctttctttttttttaaatgaagccaaagattgaaattgaccttcaaatgagagcaggcagttcccagaaggtccagtttcttttaagtaattttgttttggtgaaaagaaaccagcacttattacatactgtcttaggaggtggggtacccacagctgtgccctaagtcagtggcagctacccagagactctgaagatggaggcttggagtaaagctctgtcctgacagaggatgggcattctgtctgtctccttctcaagaccgtctttcctttgggggtggaaagttatcaaatcaatcctccccaagccagggtaggtaatgagacagcaggcaaaactgcctggggcacccaggcctggaactgtgagcagagagatttttgtgttcccagagaagcagcagcaaggctgagacagaactccagctcaggtaggagggagcctgcacctgcaggtggtgccagccgtgtctcgggcacagaccccttccttctgctgggagggccctcaacatctgagggtcttacagtcaggtgcctgctgtggaggtgagcgttctggagtaatgaaggcttgcatttatagagaactctcagttctcatgccagatcctgtgggggtttggagaggaggcagggaagggttagttggctattagcattgaggaaactgagtcacagccaggttaaaagacttccctggggcatgaaaggattacagctagagaatggagctcagatttccgggcagtgcgtcctgtcccgtgcactggtccatggcatggctgaaacacttacagaggcttccaaagggcagggacagtttggcacaaggaggacggtagtggaagccacagagcacccgagaaaccactgctggggcaggaaagggaaccccatttcctgagtcccgcccagggagctgctgggggccggctcactaacccaggagtgaggtcatgccggcagcatcacggttcttatcttttctctctgatccaggacctggcctgtgggtccttctgagaggctgccctcaagagcaggtatgagagtgagtgagtgcacagcctgaatccggctcaatgaagacaaagatgatggtgagaaaagtgtccatgagcccttggagaaaaccctctccagcaagagggacaccttagccacctgtggcctggcccggatcacctgagcaggccactgccagaggccgcgcgggagaggacacggctggcctgggccccacagccctgctgggcggcagagctccgggtcacgggcctcaccaaggtggacagagaccgtcttccagcagacagacctggtccagatgacccgagcaactgggtgctagtgcaagcgttacaggagggaatgggggtgcggagccctgtgcgccagaaaccttacagaaccagctcccgggggcctgcggattcaccccaaagccaatgaggccctcctgacccaaggggaaatggagaaactgaggcaggacggagctgactccaaccaccccctacttctctctctgtctctctcacacatacaccacacacagcactccctcacacacacaaaccacacacacaccacaaacaccacatatacaccatgcatacatatgccacacacacacacaccatgcacacatataccacacacagcacacacacacacaaaccacacacacatcatacacacatatactacacacaccatatgcaaactacacacacacaccacatagacaccacacacatacagaccacacacacacacagaccacacacacaccacacacagacataagatgacacttagacacacacactcacttgtacaaacagaagtgggcgtccacagtgtggggctgtattttcttttcctttctaggaaggggatgcggctaatttgtgtgtgtcttcccagcggcctgcaggcaccccacccgttacccccaccgccccccaccccctgctgtcctccccagggccggggccaccacaggaagccagcccatgcggaagccatggagagcaggagcggtggggcaccgggcagcgaacagacgggatcaagaggctgagcgtgtgaccccagggaagacagttcacatcagctgtgcctcagtctcccaggcaccgaagtgatggtcaggcctgactgcggctggtgatgccacccccgtgctgaggggcagagcccctggggcaggcccactgcaggtccacagcgagacggggagatgcgcccggccagcctgtggggacagaagcaagagcgggaggacagcagggccggcggttcatggccatagacgggacaaaacagcctcaaacaaaatgggtgtggctgacagagatactggacacaggagtcctcgagtccagagcctacacctgccaaatgcccagctcactgggcaccacagacatgatgaggacaccacttctcatgctaaaaatcagcaatggaaggaagtcatgaaaccgtcttctgttcttccatagacagtctcttgcagggttaaaacatagcccaagttgctgtaggtcagttcttcctacagggaattcaagctgatcaatatggaagaaattacagaattagaaaaccccattttgcaaaataattgagatgcaatgagcctcagcaggtggcatcgttgggtgacagttggtgagaagggcagctctccctgctgccctggcacctgcactgcaggtctgcctctgccatggtctcgcctgataaagtgaacaggaggcacaagtccccactggaacactggctacctctgaaagaaggccagcaatcagccgttcctccttttcctatcactaaagcttctcttccaaggacaacacgaggagctccctggaaaaaccaaaggcacccagacacagtggctgggagcaggggagcccctttagtcttggtgggtttggcgggaggagcatttgacgctgccacttcttctgcccagtgggtgaaccagcggctgtgctgtggcctgagtccaggccagaaagatgtagaaagctatgagggcactagttggcaaggtcagtgggaagcagctggaaatgacaagttgggcgctgggagatttgttcagaatgtggagactgagctgtgccaacagagtgcgtgtagagaggtgcctgaccacgctgccgcaacggggtccttctgtatttcatggtgtggctctaattctctcagcatttagcaatgcatttttatattcgtaataagacctttgggccacggtgagctaaaaaataaaatgaaagtgcatgtgaaataagaagttaacttattggatttctgttcctccagaaagttgattatgatgtctacttacacaaaatgtttgtgaacatttaccatttgcggtaaatgcagtgacatcaccaagcacatgaaaagcagaagaaacagcagcatcaacctcaaaagctggtaactcttttcaggcagccaaagacagtgactgacgcctgcagccgtgtcactcggggacttttcttgtagatcaaatgtcagtgctcattaatttccttctttgtcaactttgagttttcttatgaatttactcgatgacgtgatagctgttattgtgttacctccatgagcccaatttcacaagacagttaagtgatatggatgtaatatgtgtattatcagatgcttccaacagaaaagctcattcagttaatttgaataatgacttaatttttattcaaatcattaaataaatgtaaagcttttattaaaaacaattattattgttttaattattagcaattattaaaagcaagtttgcaaacagaaagactatttaaatttcttaccacaaaagaaagagagaaactgaataaaacgcataatgtctacccaaatagtgtatgagaataactttggaattctaaaattgcttcttggagcatctcaatttatgaaacagatttttgctagagctcatattttaatagtatgtatgtttattatatatgagaatggaatgaaattgaaaaggcctgtgatttttagcacataaatttgataaaacattcaaaggaattatacatgaaaaaagcctatttgactcattttgccctataaagacatttatgaaagactttggattgaactcagaacacaggacctgtgacaatatctgggtgaaatattgaccttttcattagaaaatactgagactgtcttcccctgagcagagtcagctcagatcttacctctacagctgctcattcatctgacaacctcagggtctacagagaagattccacttagctggtcggcaaactcaaattcattagccacaaaaatgtcttcttggagaggattccaggcaattttatgaaagattaaaataaggcaattctgaaaatagcacattcttctgaaaaatgccactaatggcaatagaaacaaataaggcttaaaaactgattgaagaatgtgaataggtatcaagaaaaattattcaggccgggcacgatggctcacgcctgtaattccaggactttaggaggccaaggtgggagatctcttgaacccaggagtttgagaccagcctgggccacatagggagacactatctctataaaaataaaaatgaaaaaattagctgggcatagtggtgcatgcctgtggtcccagctactcgggaggctgagatgacagaattgcttgagcctgagaagtcaaggctgcagggagctgagatcacgcccctgcactctagcctgggcgacagagctggactatgtctcaaaaaaaaaaaataataataattatgcttgtaattgctttttaatatccagataatcaatacaacaaagaaggcatttgttttttgctttaatgtaaacatatgttattttttactttttgaaagagcatttaattttttctctccaattacaattttcactttactagaaacaaaaattacacacccctagagtattttccccttgtccttatataccaagatatttcagtggaaatttatttttcttcagcttcattgagttataatttatatccaacaaaatccacctattttaatttagcaattggtagctgtagtgtaaccatcaccacaatcaagaaatagaacattttcatcactctaaaaagttttcttttgaccctcccctgagccctgaccccaattactaataatctcgaaagcatcgaaagcatcttttaaacaacgtaattgaggtataattgccatataataaactatacatgtttaaagtgtgcaactcacatgtgttgacacatgtgcaagtcttgaacatgtgctcaagatgttcagcatcaacaacaagatagtcagcatatgcctccttccattgtgtggttatactgcagttcctttatccatctcacccattgatggacatttgggttttttctatttgtagctattacaaataaagctgctatgacttttgcttatttatgcaaaagtcttcacttgggcacagacttttctcttggataaatacctcggagcagaacaatggggtcatgtggtagctgtgtgtttaattgtcaagaaaccgtcagttttcttttttctttcttttttttcttttttttttgagacagagtctggcactctcgcctgggctggagtgcagtggcgccatctcggctcactgcaggctccgcctcccgggttcacgccattctcctgcctcagcctcccgagtagctgggactgttttctaaagcggttgtaccattttacattcctaaccacagggtgtgagagttctggtctctacacatcctcgccaacacttggtgtgggagctcttcttgcagttattctaagctgcttgtagtaatagccactgtagtcttaatttgtgtttccttaatgactgatgctgctgaatctcttttcatgtgctatttaccatttctatatggtgggtgaagtatctattcttttctcttttttttatttttattttttgagacggagtctcactctgtcacccaggctggagtgcaatggcgcgatcttgtctcactgcaacctctgcctcctgggttcaagtgattctcctgcctcagtctcctgagtagctgggattacaggcacctgccaccatgcccggctaatttttgtatttttagtagagataggggttcatcatgttagtcatgctggtctcaaactcctgacctcaggtgatccacccacctcagcccctcaaagtgctgggattacaggtgtgagccactgtgcctggcctattctcttctttttttaaaaaattaggttctttgttttcttactgttgagtttcaagcaatctttatctatatggctacaagtcatttatcagatgggtgatttgcaagtattttctcctgtggtttgtcttttcattcatttatcaatgtctttcaaaagcagaagaacctcttcactttgacaaagtccaatttatggttttagtttttgtttttaaacatcgaatacttttgatgttgtctctaagaaatctttgctggccgggtaccatggctcacgtctagaatcccaacactttgggaggccgaggcaggaggatggcttgagcccaagaataccagcctgggcaaaagggcgaaaccccatctctacaaaaaatacaaaagaaattagctcggtgtggtggcaagaccatgagggaggggccgtagggagacgcaggggcataatggcaagtggttaattctagcagcctaagaggtaaagtaaacaggaaaccgttgaggtggtgttcagggccacaggagagactggaacactggccaaatgcttggctctgttagagtgagcagaataaaagcaggccggaaaaagcaagtcagaactttggcgatttctgtcactatcaggaggcactggactgcaagtcacagaataaactcatccaccgtgacttaaacacgtagggactgtccttctcccatcacaagaagactagagccatgtctctgctgggggcttctgaggttcacgttgtcagagccaggatgtcagcagttcttggatcttttgtcaaggccatctctgagtcacctctgtctgcaggggactgtgggatggtgagtgtttagctctccatcctctggatggaagcaggcaggggagaagaaggttggggagggtgctgggttagccacccatgtccaccctgagcatgctgggggccaggcacgcagcttctgcaagacaagcgtggtcccgagcccacctggaaatctgggagctggcaagtgttccctgaattcctgcctccctgcttctccatcggcagcattgctcaccgcattcttgttgtaacctgtctcggctgtgagctctgggcgtttgcttccttcctgggtagctgccagtctgaattatttatgaacctaaggtacacactgatggcattccaacaaaggccaccaaagggagcagcctgtctgtaaccctgaagcttagcacacagcgaaaaggactcagataaaactgtaagcttcctctgcagggaagaggaaggactggacttctccagggcaggcggaggcaccagaagcaaacctgttcctgcttccctccgttttccaggtgccttagggtgactgcggtaactgggagctgagcactgatgggcaatggggcaagaactgggccatgtgcctcggggtcccagcacacaggccagcccctgagggtaggaacgagagcccagactctggaggcaggcagaccagggtttatgccctggcaattcctgatggggccgaggatcttcacctctttgtgcttcagtttctctatctggccagtggggttgctgtgaggattaaatgcagccgtccctgtgtggtagattgtttgcaacaacaacaaaaaaatggccacaattgttccactccctgagttcacacccccttgcaatgtgacttaacagcaactctcacggagaggcggagtctcttccacaccctggaatctgggcgggcctgtgactcacgatggccaatagaatgccctgcaagtgacgtcatgcccttccgagccttgcagcttctgctggtgggaaggccgatggcagagcccagggaagttatgtaacgggcccagctaatgagtggcagaggccagagggcttggcctgcagaactgtctaaggccagaggccgtccatacactccgtctcctgaaggggaagcgggctcttctcagatgcacagggacaatgtgaaaatcctgtcctcagattgagaggctgtttcgtgggcaccgaattcggggtcaggaaagcagcctgcatccacgagtatcctcgggttactaagtggggccagtggctccaggtgtaacccatttaagtttgccagacagccgggatgtaaggaatgccctaatgattcccctttcccccccacggaaagtgggcagtggggtctgggaaggggtttgggaaggggtctggggagtgggatgaggttgggactaactcttgttggctttccttacagaaggggtagctggagtgtttcaggtctatttgcttgttttgtgtttttcaatttcgggttttttttttttttaagacagggtcttgctatgttgcccaggctggtctaactcctggattcaagcgatccctccacctcagcctcccaagtagctgggactacaggcatgagcacctgcacctgcttgtttttttgtttttttgagatggagtctcactctgtcacccaggctggagtgcagtggtgtgatcttggcttactgcaacctctgcctcctgggttcaagcgattctcctgcctcagcctcccaagtagctgggactacaggtacgtgcaactatgcccagctaattttttgtatttttagtagagatggggtttcactgtgttagccaggatggtctcgatctcctgacctcatgatccacccacctcagctgcttgcttgtttttaatatatccttgctccctgtctttcacaaaagatgctttttgcgggcagctgatgttctgtaacttcttgtgagtctaccgcaagcatgcctgtgtatgtgggaggaggaggtgaaaacggcccagcagcttcccctgtgatcacagaatgggcaccaaactctccatcgggaaaaacagccctggggactccaccttgagcttatgcattggggcttggggccaccagatagttctattttgtttttaaaatcagccaatggccaaaatgccaaagcaaagacaaaaggtccccaaagctgccattgctcatctcctattagtctttaaatctggaaaaaaaaaaacaaaacaaacaaaaaccacgggaataaagcatacacggaagtgttggcagcttgcacactcagccatgagatcccaacctgaaacacccatgtctgtcccaacggatttagcctcctttaaccagggcctcccggagatctaggtttgcaaactccttggagccctcctggccctggattcagcagcctctccatagttctggcctctggtatttggcaaaaagcctaaaacaaaacaaacaaacaaacaaacctgctctgcaactgcccagagacaaaagctgtttcgctgtgagtctcaggctgctctgcgtagctctgaaagggcaggtgacagtctttgtttttagcatagttgcatgtttccagcacaatctcgtcaatggcttatgtggtaagtaggtgctcaacaaaggtgtcagttaactgaagaaccccctggaccagtgtgagaatctccaggagagctccctaaggcacagatggctgagccttgccctagattccgtgggtctggagaagggccctggaatgtgcatttgtcacaagttccaggtgatgctggtgccgctggctggggaccccactttgcgaaccgcaggcagagtggatagaagcctgtctccagtgccagacggcccggctccacaggacagctctgtagtactcaacttcctcctgcctcgatttcctcatcagtaaaattgagggaattataatgcacacgccgcctggtaaatgacgcataaatgttatttaaaacataaggaagcacacagaaaagagagaacaaaagtgaaactcctcaccgctctgtttccctcctttcccttccgcctcctcgccctgagctggaacgagggggacgtggaaccctggctccatgctaagaccccgctgtgggcaaccggccctgaccccccaaaataagcaaatcgcaaggtcaaatttagactcccaggccccggggctccaatggctccaatcccctggactcacagaacccgaagagccagttcctctgggcacagaacaacacgcgttgggcactgacaggaagggaaagaaaacagcctgcggaggtatttccagcgtgcccagggcagctgggaggaggctccacggcgcccggttcttctgttggcagaagggtccagaatcccacatctgtaccttccccgctgtcacgcgcttatgccaggaacagcctgagcagggtggccctccggggttcctgggaggcagggctaaggacccatggcaggcctgggtgagccgcctgcacgcactctgctcactcgtgactcccctgcagaagcacagcctttcccgtgctcctcagtttacctccgtttgcactaacacgaggcgggggacaagaactttcctgtacctccttcgctggctctctctcacacaacccccaccagggcagctgaagaactctcagaacatgaatcagaccccagagccaccttcacatggttcagtgcccacaagacacctcgagggctgctcgtgaattagtcggggtccctcacctcatcccacacccctgttcccgccacctcccacagctggggcccccagacatcatcagcacagtcactgctgccagccttgacacctgctgttccctcatccgggaaagcccttctgcacctggacccctggggagcccccagcaccagactctggggcacctggacccctgcagggcccccagcgccagcctctgggacagcctctgccggtcagtggcttctctctggtctcccgccatgtgctgtgtccgtggctgtctacagaagtagacacaatctccggccacctcagttttctcagtaccccgatcacaatgtagaaatgacctgctttgtgtctggccctcaccagactccgagcccctcggagcagggtcagtgcctccacggtgagccttctattccccgctctggcaggcccagaaactccagcctcatgcaatttgagcacctcaccgacgcagcgctccagggcacgggctctgggccccaactaccttggcccaagctccagcctcgccgagcagctgaggcaagtcctttcacctcgtggtgcctctgattccttatctgcaaaatgggtacaacctctgactcagaaggctgagaggttttgtaggtctctcaccctgcctggcacgggcacacccatgaggctgaggcacaaaccagaaaatctgcttctcctgggtgagaagaatgaatgtcaggcagcccagagagtgacccgcacagcatcttggcctgcagacaggcggattatcagaaggaagcagggaggccgcactgggacggagaggcaggggcgccggggcggagaggcaggggcgctgggatggagaggcggcagctgtcaaggctcaccgttcccgcgccatcactttctgcttctgctctgagatgttccgcctcccaccgtctcactggaggcctccagacctgctctcctcagctggaccgctcttccctgaacaggattcccccccagcacacacgcccaggcctggcacatccaggcttccccagaggcagagccagccagcccatgtacagggcctgacctctgcccagacatgtgtaggttttgtagcttgactttctgaaagcaatggtattctccacttttcttctcggtggccaggggtggggtggggagtcccctcactgtcaccatctcgtcccctgtgctatcttcagaaggcatccaacacttgcgagtgttttaaataaaaaaccaggtccacccactgcagacaagcagtttagacagaggctgtcctcacccacctgctcaccgaggtatcagacaatgccctgtggcccccacagggtgctgaccgtgttaatttcatccattttcttaaggctccagaaatggatttgggagctgagatcagtcaaaaggcatgtatctaacatacacacaaccacacacacactcattcatgcatacacagacacacacataggtacacacgtgcacacacacacgcacacacgtcacagacccaaacaataaagacacagatttgtttggtttcttacatcatttttgcttcaggttttcacacaataaaggctatgttaagctgaaaaaaataagattaaaggtaacctactggtctttacgtgtgtgtgtgttcataaacacaagtgcatgtgtgagcacctctactcagaaacccactgaaaataaagaaaataatgatagaagaaatcaatgactctctagctgtagctctgagggcagttcagaaaaatgatcttcacctgccgcagagtagagctggaggctgcataggagacgtcattcccagcatccgatttctaagacatgagcccacataggactcctgtgcacacttcggccttgtgagaatcagcatgagggccgccccagcacaggtgctgctcccatggggaagaagcttcctccccgaggctgaagaaggggcccacagcctccggtagcggccagctgcagatgtctgcaaaagcagcgcccacttgggcctgccgaccttgaagtcagacaggccagtgacactagtcagtcatcactggccatattgacttgggccagtctccaaatttcccacagctgtagttttctcaccttgacaaagctatttcatcacctcgctgctgttttggagctggggtgacagcagccggttgttgaaatggctgcgcagatggaaaccatgttggtcaagccctgactttataaaaggtgttaaacaagtgtgcaatgaatggtagctatcattagtttgtaacaaggggaaatacatcatccgagggaggcaggatgtgctgcgtggaaaaggcaccaccttccagtaggaaaatgtaccttgaaaaggccccctgaggacaggggtgtccgtaacaagacgggctggggtgctacgggcagggagagactaggttattttttgttctgcaggagagggggttgatatgaggggagggaggagggagagaaacgggaggagggagaggagccaggagaggtgggtggggcgggagctggagatacgaaattcctccactgtgagtaaccagaggacccagcaaacacgacctcgaccaggcagtgggtgtgagagttttcttttaacacagacgagtacaaacaaggaaacacaaaatctctccccgtggataactcctggagacattgcgaaaaacaaagacctgtactggaagaaaatccaaacagtacaggaaggtacaaaatgaaaacagagcctctcccagccccacctccacaaaatgttttcccaaatatcttctgttcccgagatggccccggggcagggagaacggacctgacttcctgcccctgggactgcaggagcggctgcagctgctgaatccatggctatggatttagtggcttaaaaccacagaaatgtattatcttatagtcctagagcccagaattctgaaatgagtcttaggtgtgaaacgtgaaaaccgagttgtaggcagcaccctcggaggctctgggaggatcctacctgcctctcccagcttgcggcagctgcgggggtccctgggcctgtggctgcatcgctcccatctctgcctcgtggtcgcacggcctcctcctcgtttgtattcaaacctccctccatctccctcttgtaaggacccttgtgatggcatttagggaccgccagatcatagacggtcatctcccccttctcccccttgcaacatccttccttacatctgcaaagtccttttcaccaggtaaggtcacattcaccggtcctggggttaggatgaggctctctttggaggccattattcagccaaccacagggacttgagcctgagtctggctggaggagctggttaagggggcccacacccagctctgccttcagttctgacctgctttcttcttagggagcccttgtcttgtacacgatccagcatctgaccccaccttgtccccagcgcctgtcaccctgctgggaacccctgtttttccagacctggaacttctgtttctccaatactcgttgcacactccagacctctctaggaattggaagctgctcctgagccccaggcccgtggtgttcccccatatctagcccacctcccaaatgacaactccctgccacccttgcagggacccctccccagcctcctcctgcctcctagctgggcctgcctcctgctgtgctgagcagccaggacatcccctgacaccactcctggaccccaccttgccaaccacaggctgctcctgggtcttcctgtctcctgcatctgggaacacccccacccacacctggcttcggtggaacagtcctggcggtgctgctgctgggagagggaggggaggcagcgatggagacaaagggaaactcaagggcagctcacaggccaggaagattcagggactcagaggtggggggcctgaactggtgcccctggcctcctaccccactatcctcctgtcaacagggtacgagcctctccctgctcaagacaggtgacctccacagtgaggtgtccatgcctatggtcatggtcaccagctgacaccctcagaaagtcaccctcagggtgcagagcacggggcctggggtaactgcctggctccgctccctggtctggaatcagcagtgtggggcaggtgggcagtggggtatggacttgaaactgctttcccagtgcagagctgctttcaaggccctcactcttagcttgaacagcaaccatgactgtttcccaaaagggaaggaaaaatgtctttgctgctatcaatagccaaatggatcacgaatccctgggtcctggtgtttgcacatcatgtcatctcaaggaccaagccacgtggccattcttgggataacattgggttttttctactccaaaggggtagatccgtttgttatactttgcattttgtagcttactgaatgcttgctacaggcaagccctcgggtagtgcaggaggggctgggaactcctcaagggcagggagcagggctttttgctctaattgcctagtgtctaacacactgtctgataaatggtgaatggaaaaagggaggaaggaaggaaaacagcactctaagtttcaaggaacttaaaacctcttgctagggttgaaatggttgtgcccccctcaaagcgatatattgaagcctaacctccgatctgctgatattaggaggcagggcctttgggaggtggtcggctcttgagggtggagccctcatgaatgggacaagcgcccctataatgagatgaaaagatcagatttctcccctccccccgagtgaggacacagcgagaaagtgcgctctttgaaccagaaagccctcaccagacgccgaatctgctggtgccttgaccttggactttcagcctccagaaatgtgagaaacaaatgtctgttgtttataagcccttccagcctatgggattttgttctagcagcgtaagtggactaagacacctatgaaggacattacacattttacaagtggacaatgaattgacaattgtcacaaggcttgagctattcatatgggcttcctacccaactctggctgaatccaatgtcctcaagcttctcttattccattctgcctctctcagggtgttctcctctgccaaagtggggggaccctcttctgatgtttacgcgagtctcaagtccccagggattcatctcactgtgatttagccagggccttgttgcttcttcgggaatcagatggctggaccacgaaagcccagcgcctttcctatcctgaaagaagctccggggaaaccttattcaatacgtggagttagggagctgcatccttagcatgaattcaggaggtatcttttctgtttgagatcaggcgtcaaaagccatcatgccacattgcttaaaaacctggcccctggaaccggaacacctgggttcaaatcctgcctgtgcctcatgtccttgggcaactttcctagcgctttatatgtcagtttcctcatctgcaaaatggggaccacagaagctcctcaccaggggctgccgtgagaatcaatggggctggtgtgtgacgatcaggtgaccagggcaccttggttggtttgactcactgtgagccccacccacagcactgcacaagccctctcagcacttagggtcagagaagttcaaaatttttgaatttcaggaaagtaaaatggtgcatgtaccgaacaatccccaaacccgatggtgggatctattaatatttaagggcaacactcttcatatttctgtgacacagcacagtctccacaccctgagcaggatcattaaatgcatttttatagtcagttcaggtcagaaactgctactgcatgagtcacatatcagatcagattttgccatcaaatgaattacagaacaggcttttctgtgtattttagacttcagaattgaggacaagaggtttttatctggtcttacaaatgccagtgcagtcagggcccaggacatggggtccatgagtgaggggtcctggggctgtgagagatggagcccacagagggcacagtgagttcgactccagcggaaggagactcctgggcaagaacgtccaatgccgcaggacgtcaaggtttaggtgaagtctcctggttcataaatgttgtaagatgacaaaatttaaagcgagggttggcaagccaagaaaagctgacttgtaatgttgtccagcccatcgggaactccaggtggacaaagagagtgtggtacccgggtggccgccaggccctccctggattgtcctgcctttcccgggctctgcctcactcactctcccttttcaaaggttctggtgaaggatctgaagtgtatggccacaccagtcccagaagagcctgggagaagggaagatggtgaacacagtggagttctgctgcaaagccgaagatggttctggcacgtggcatgacccacatgactcaacatcaggaggtagagccttaaaaataactcaaataaggctgaggcaggtggatcacgaggtcaggagattgagaccatcctggctaacacggtgaaaccgcatctctactaaaaatacaaaaaattagccgggcgtggtggtgggcttccgtagtcccagctacttgggaggctgaggcgggagaatggggtgaacccgggagacagagcttgcagtgagccgagattgcgccactgcattccagcctgggcgacagagcaagactccggctcaaaaaaaaaaaaaaaaaaacttgaaactcaaatacccttccattaaattaaattagggtgcaactcccccccgccacactgtcgtcactgctaaatattaccatgcctaaatttgacatcctcctgatgaacaggtataacattgattcacaaggagtgctgcttcaggtagctttggtctgaactctaaatttctcttctctctctctttctttcctttttactgtttagaatgaactctctctggcattataataacagggcagcctcctaactgtcagggtggcttctgttgcaacacctagatatttcaaatgcaggagagtgatcggatcattccaagggcaggctatcccacacaggccctcatcaccaggtcagcccacacgggccctgatcaccgggtcatcctgcacaagctctaatcatcaggtcttccctcacaagctctaatcaccgggtcatcctgcacgggccctcgtcaccgggtcaccctgcacgggccctcgtcaccgggtcatcccccacgggccctcgtcaccgggtcaccccgcatgggccctggtcaccgggtcaccctgcacgggccctcgtcaccgggtcaccccgcacgggccctggtcaccgggtcaccccgcatgggccctggtcaccgggtcgccccccacgggccctcatcactgggtcgccctgcatgggccctcgtcaccgggtcatcccccacgggccctggtcaccgggtcatcccccacgggccctcgtcaccgggtaatcccccacgggccctggtcaccgggtcatcccccacgggccctggtcaccgggtctctcgtcctccctctgcatttgcttttgtagattccacagatgagtgagattgtatcatttgtctttctatgcctggcttatttcacttaacataatgccctctaggttcattcatgttgttgcaaatggcaggatttccttcttttttaaggcagactaatattccattctgtaagtatgtcacattttcttatccattcattcaccgatgagcacttaggtcaattccatctcttggctattgtgagtaatgctgcaatggatatgagagagcagacatcccttcaacatactgacttccttgggtgtatatccggaagtgaaattgcgagcaatcatatggtagctctactctaattgttgaggagacttcatattgctttccgtcatggctgtactgatccacgttcccaccaacagtcatgcctgcactgatccacgttcccaccaacagtcatggctgcactgatccacgttcccaccaacagtcatggctgcactgatccacgttcccaccaacagtcatggctgcactgatccacgttcccaccaacagtcatggctgcactgatccacgttcccaccaacagtcatggctgcactgatccacgttcccaccaacagtcatggctgcactgatccacgttcccaccaacagtcatggctgcactgatccacgttcccaccaacagtcatggctgcactgatccacgttcccaccaacagtcatggctgcactgatccacgttcccaccaacagtcatggctgcactgatccacattcccaccaatagtgtgcatagaggatagtccacatcctcaccggcacttgttttctttcatctttttgataattaggtgtgaagtgatatctcattgtggttttgacttacatttcctagatggttggggatattaagcattttttcatatactcattggccttttggatgtcttcttttgagaaatatctattcaggtccattacttatttcttaattgggttgttttcttgatattgagttgtttgaattccttatatattttggcaattaaccccttatcaagtgtgtggcttgcaaatatctcctcccattccatagggtgtccctccactctgttgcctgtttcctttgctgtgcagaagcttttgggtttgatgtgatcccatgtgtctatgattttacttttgttgcctgtgcttttggtgtcatatccaaaatcatcattgcttagaccaatgtcatagagctttgccccctatgttttcttctagcagtttgaaagtttcaggtcctacatataagtctttcattcgttttgagttgatttttgtatatgtatgagataagggtccaatttcattcttccacatgtagatatccagttttcccaacatcatttcagtttgttttgttcgaagctattgagttggtggtaattttctacagcagccccaggaaatgaatactgtggtcatattctgaacatctgagttttcacaggggcctcgttgagataaagtttgatccgtgtgcaagggtgggttgacagggaagccctgggatcccctcaatccaggtttgaagcctccttgctgaacagggcacctgcacccctcacctgggatgtggtgctagcaggacttgccttggtggcttcctggcatgactaaaattcagataataggtggagggtgcctggctggggctaaacagatgcatctccaaaaagagttttgctccaatcaagggaaaggagaaggaggcagagcctatgcaagccctcagaacctggcatcagggagtcttccaccgccttcactctccagatggccttgcccacatcctggaaagcaaaggaccctgccagctcttcaacagaaacattcacaccaggttttccatcactccacaatcaccagctctttagaaggaggcagagcagcgatcatcccctccttgcacagagagtgagatacagagttctgcaccctcaaagccacaagcacaagcgtatctagacttcagccttccaggctgcgaaatcagcaggagttcctctcatccacagggacctccaaccccaggtccttccagctcccccaggcagagcccagcctccattccagtgtctctagctttctgaggactctcttccaagtcctcccttatctctgcccccaggcgagaggtggcagcttccttccttcctgcaggagtgggaggatgagtgctattgattctcactcatcagcacccactttgcttttggaggcggctttggaaatgcctttcccaggctcagcccttgcctgcagccatgaccttacctgaagaagaggatggatgagggactgtccctaggatgcaggaatggtgaaaaatgacgcttgtgtttacttagacctcctcaccaagtcggcctgcgttctcctctgagttccacatgggtcctatgacgtaggcactaatgccaggcccactttagggacagggaagtaagtacctagcaaaagtcagagacaggtaccactgggatataaacccagctccgaatccagcaccacgcttaagaaagctgctctgtaccttgttgccaagttgctgcttctttcaactcctaaatgcagcattttcttgttccttctccaaattgtttctctgctgagcagctgcagatggaaaaccacctacgatatttacgtctgccaaagccaaaccttctccagtttggcaggcatgtgagactctggcacagggtggaggggcctctcgctaagtccccttgctccgaagcaggacagcagttcctgtcaagcacctgacatgtatgaaacaactgtcggccccactgtggaaacaaatgaagaccacccacctgagaccaagcgcaggctgtgtattctgagcaggctctagcgagggggccgcttccaccagctgcgtttggcagagactcagggcaggcagtggggagcttggtggtggacgacaggctccaggggtgccccgatgaggccgtcttcaaaagggagctgggaaggctcgtggaagtggacatcctaggggattggctaggggcgcatatttgactttctctggttggctctaaattagaagtaggaacaaaaattagaaaagctggcagtcatcaaccaactcctgaccattctggcctgattgctgcaaagactgtgagtctctccattgtctttgtagggaaggaaacaactactttaccgtcttaggttcagtaactgagggctgcaaattacatggacaaaagacggataaacaggagaaacgggtttattttatgtgcctacgggagccaacaaaagaagtagccggggccgggtgcggtggctcacacctgtaatcccagcactttgagaggccaaggcagaagaatcacctgaggtcaggagttcgaggccagcctagccaacatggcgaaacccagtctccactaaaaatataaaacttagccagtcgtggcagtgtgcatctgtaatcccagctactcaggaggctgaggcaggagaatcgcttgaacccaggaggcggaagctgcagtgagcagagattgcgccattgcactccagcctgggtgacagagcaagactctgtctcaaaaaaaaaaaaaaaaaagaagaagttgctggctgataaatagctaaagacttgtacacctacttagtagggaaaaggaaatgggggagaagtggcttttatgagaaaaacaaatcattttctttaggaaaaacaaatgggattttaggagaagagaagggcgataaagtttgtgataatgttcgtctaaacaggtatgagtggtctttccatcttcttcagggccataaaactcccccagagaggagaattatggttgcctccttgcccagaagttgctgtttttaatcagataaaggaaggtctgaggaggcttttttctgcatctattaaatctcaaatgtcttcagcttaaagcaatctttatgtcatctctggatgacatctgtggagtgggtccccacatctgtttgtatactcagtctctcaccattttaagggtgaggaaactgaggcttgaagaggtgaaacaccttacccaagatgcccatcggtgggtcacagagcagtcctgctccaagatcctttctaccaagtcacctcactcatacagggagggtcaccagattgtgtaaagatgatgtaacagaagaaaatcctgctcacccactcatccattcatccatttatccatccacccatccatccacccatccatccatccacccatccatccatccacctatccatccatccatccacccatccatccatccattcattcatccaaatatccatccatccatccacctatccatccatccatccacccatccatccatccattcactcatccaactatccatccatccatccacctatccatccatccatccatccacctatccatccatccatccacacatccatccatccattcatccatccatccatccatccacttatccgtccatccatccacctatccatccatccatccacctatccatccatccatccacgcatccatccatccattcatccatccatccatccatccacccatccatccatttatgcatccactcatccatccatccacctacccatccatttatccatccactcatacatccatttgtccatccacctatccatccattcatccattcatccatccatccatccatccatccatccatccatccatttgtccgtccacctagccatccattcatccatgcatccatccatccatccatccatccactcatccatccatttgtccgtccacctagccatccattcatccatgcatccatccatccatccatccatccactcatccatgcaataataatttagccccgaatcatgctggatgcttggagtatgaagtccgatatgccacagtccctactctagttttgaggtgtccctactctagtttaggggagatagactcataaagagttattgttgttataatatattaaaatctacagtgactactttcatgaaatacctggccattcacctatatcccggaacagaatgttgtcagtgcatggtgacaagcatgttcaccaaggtggtgagatggcagagatctgtgtcttcccatttatcatgtttgatgttttccaaattgtctgttttccgaatgtattatttttataatgggagtggggattctttaaaacttcaatatttctatattgtctaaaagtcgattggttcttgggcccatttgacaccttacctaatcaactctccatccttgctgctcagaggctgccctcccccaagactcccccagcccaccccagaacaccagagctttgcaaacctccagttcttgctcaccttgaattctgtctgcagcgttcttaccatcacctttgcctggaaaattccttttccctcaaaatctagtttaaaggtctgctttcctgtgtcacgtggcctgcctgcctctatgattttcccccactttcagtgttcttcaaaatgtgctatttaatagatgcatgatctcccctatcagtgcaccatagtttatttcatcaacccttggtatgggatcatttaggctctttctgacatttgctattataaataatgccttaattagccttctccttcacaatctttgatcatatctctgtttccttagaatagatttctagaaatggaatctccagggcaaagagtaagaacacttttaaggctcttcatacataattcaaaattgctttccaaacaggttgaacaatctgtgctccagcaccacagtgtaggcctgcctgcaggaagtcattatttcaagtgtttgttactttgacagctgaagatgccactgtttcattgttttaatttgcatttctttgactgtcagttattttgagctttgaaaaatgagcttactttaaaaagtgtatttatacagtgtagtggtcaagggtgcaggcttcagagtccaagagatgttcagaccctggctctgctgatgaggacctagtgacctggggagccctcgtgaagatgaaatgaggtcatgcacacaggtctctccgctggtgtctgtgacctgagtgtgcaatcaacattagcttcattgttctcagagttctgagagcttcctttgttttgtgcaatttctgtgcatgctttctgaccaatttgctagtggagtgtttttcttattaatttaaaggagctcttctatatatttaggagttcaaccctttgcttgccatatttatgctaatattttttcaaattttttctctttgcatcatttttactccaggagatttttattttatgtattcataccttcattgatggttccttccattaattttatgccgacaatttcttcccagaactgagatccattaaatattgtcctctaatatatattgttttacatttatcttaaattcacaggcaaactaccttggtataaattagggaaaatctaacctgattcttttccagtgtcattcagaaaataattcccttttacggactcaaaagcagaaatgtgacataatcagatgtgtttttaaatagcttgctggctccagtgtggtaggaaaaaaaacagcaatcataaaaaacaaccaacatttatttagtacttactgtgtacaggctgtgttctgagtcctttgcagatattcactcactcaaccctcataatcaccccataggaaacaaaggcttacgctggggtttaagtaacttgcccaaggtcagagctagaagcggctgaaccagggatgggatggaaccaggaaggggccatcagagttaagcagataagtcaacgcaccagtccagatgaggtagagggactggcctagaccacggcagggaaaggagaggagatggcatactggtcacgtattgaagatatgagtctgggatttggcagtcaaccacccattgcggaccacgaggacaagggagagctctagagccccatctcagcatgcagctgttaagtccctcaaagaagacttgcactttccgtaaaaccatcgccttcctctccctcactgttcccagcatccccggactgcacagggtagaaaagcagcaagtttggaccacaatcccaaataccgaaatcccaaaagatcaaaatcgctaaaaccgccaacatctaacatcccaaaagtggcaattacaggacaagttttttgtttgtgttccttttctttttaaagtttttttttcactattttaaattgtcagcattttcattcacagttctgcatgctgtgtatttcatctttgcatcatttccaatactggaggtataaattgtatagggactttttatttttatttatttatttatttttgagacagggtctctctctgtcattcaggctggagggcagtggcatggccactgctcactgtagcctccactgcccgggctcaatggagcctcccaaggagccgagactacaggcacacatcaccacgcccggctaatttttgtattttttgtagagacagggtttcgccatgtcatccaggcttgtagagatttttagagttctaattctttatgcattttttgcagatctgacttcataaaagtgaactatcacaatgctgctttgcaagctgtgtgtgagtgtaaaagcgttgaaacttcctcaataaatgaaaagatatcttttttgtacatctgcatttgtgaaagacaacatttctccagatctctctcagctctttgggtgactgcatatgtatgtggcggggacccatcgaggttgctgcgcgatcttgtcagtagacttaggttgtccgtcacggcacttcaggtgaccgcagttatacgccaggtgcacacaatcaccaaccatagcgatctgcattaccacatctccctttctgacccatttccttatgaatacggttcatctgctcatagttgatatacctgtgtgactctcattagcacacctgtctatgcttacaaaaacatgtgtgttcttactgcctgttttattaaagtggcctatgaagtgttccattgtgctttttatgtttaatttttatgttttatgtttaattttaaaacatacgtttatgttttgtttttatgtttctcaaataaattcccttttaaaaatgtaaatattttctaacattttaaaattattttttacagaatcagggttttaggattctgatttttcaggatttcgacactcgggattgtgtctattgggattatgatgcactcccaacagcaggccggtcctcatctgtcccaaacagctcagatgcggtgggcactgatgtggccgggtgggctcttcgttcccgcccactgaaatcccacccacctgtttcttttcctcttcttcccccagccactcccttccaagaagcctggctctggcctgaggttcctggggagggaaggtccacgcagtggtccaagtggcctgcctgagtcacacctgagccatctagtcacttctccattagctcacactctctgagctacagaggcttcaggtggtgttagggggcccagtgatcctctagtcgaccagctcttgcagaaccagccatgactaggccagtcattcggggtgtaagaagccacggtcagtcctcactctggaccctccgatcagacgacgggcctgctgttctgagaccgaggcagcatctctgcgagggctgcaacagctgctgggctgagcgcagaccttcctgatacgcctcatctgtgacctctgggtggatttgagctcctggctttacctctattgcctatatgatcacaacaagtttcttctctgtcctctgcttcctcttctctaagctgaagccattgaagcatccagctcagttttcaaaaattaatagagattcatggaaataaggtacccacaggattgagtcagtgccagacccatagcaaactctcaaaatatactagcataaaaaaaaaagtgtattagtctgttctcacatagctataaagaaatacctgaaactgggtcatttataaagaaaagagatttaattggctcacggttcagcaggctgtacaggaagcatggggacatctgcttctggggaggcctcaagaaacttacaatcatggtgaagacaaaggggaagcaggcgcgtctcacatggccagaccatgagagagaggtgggggaggcgccacacacttttaatcaaccagatctcatgagaactctatcacaagacagcaccaggtgatggtgctaagccattcatgaaggatccaccccagtgatccaaccacctccaaccgggccccacccccagcactggggataacaactgaacatgagatttggtggggacacaggtccccacctcaccacatcacacaatttctctcctttctttccaggtaaccagtttgcaagggcttgccgtatcctccatagatggtgtaattggaaacgcatttgtgggcgtggcggtgtggtctgggggaggagccctagcccccctctctcctccaaaactctcactggtcacagattcacgtgtgtttataattcctcattttaagaaaatatcatgattcccattttacctgccattttcccctcagatggctgagggaagagtctgggatgatgattggctcctgtgctctgagtgtgcaaatgctccaagggtgcagccatgctctgggcactcaagtcagtcttagtcagtgctccttcctcttctgccagctcctcccgttccagtgaccattcctcttgctgaaccggctggagaaggcgcgcgcggtcccaggccgctgtctgaagggctttccatttgtctctgcagacaatctcatattccttttccagcctctgatggaaggggcgagggggactcctccaaccagctagctgtgcctttctgacccaggcccaggggctgctgcctgccgtggcaggtcactggctgtcctggaacttcctggacattgctggtcttgcatttcctatcgtggaacacttgctccatgacacaggtctacttatctgtcaacaaaaccacctcatttacctgcttctccacccacctccttccagccatctccgcccctgccctcactggtgaatggatgaattacccaacatggctttgtgctgggagcatggcctgccttggagagaaccacaaacaatgacctgggctgcatgaagagtcaggtcagcacactggtgaggttaagtcaactcccagaggccacgatgacaggccacgaagagtcaatgagagccttttgggtttgatgcccgaagcactctgtcccccatcacagtctttaggggcaagtgcaggagcctccagccagtcagaagacgtttcctccaagtgtgcagccataggtcatcaaagcgaagggtatttagatttctcaaacagaatcagtaggagttagagagagagggaagaaaggagggagggaaagttattgggaagacctggctcccatggctatggaggctgagaagccccacgctctgccatctgcaagctggaggaccaagggtgctggtgatggtgctgagattgagtctgaatccaaaggcctgaaaaccaggagagcgatggtggaactctcagtcccagggtcagagaaggtgagaggagatgtcccagctcagcagacaggaggcatgagaggactaatatggtttggctgtgtccccaccctaatctcaacttgaatgttatctcccaggattcccacttgttttgggagggacccagggggaggtaattgagtcatgggggccagtctttcccatgctattctcgtgatactaaataagtctcacaaaatctgatgggttatcaggggtttccacttttgcttcttccttgtttttctcttgctgccgccatggaagaagtgtcttttacctcctgccatgattctgaggcctccccagccatgtggaactttaagtccaatccaacctctttttctttgcagtctcgggtatgtctttatcagcagcgtgaaaacagactaatacagggtcaatttccccttcctccacctttcgttctatccaagccctcaggcgattggatgatgcccacctacactggggagggccatctgctttactgggtctaccacttcaaatgctaatctcttctggaaacatccacacagacacccccagaaattatgcctaatatgggtaccccatggtctagtcaaattgacacctaaaattagtcatcactcagagtctgtgtctctttgcaacattaagtcaacctccactcccctcatcctctcctcccagccacaggtcttgccccaagaaggacctcccaccccatccttggtccttccaggagatgcagtgtcttccctaccccttccccagaacaccggtgattccgacgcctccttcttacatgcaccttccattcactcattctctgaacagcagatccagtggttaccaccctgggatcaagtccaagtaatggatatttagtaacagtgagagcttgggtgagtcattttgcctctgagagcctccgtacctccatctataaaatggggatgatttcttccctgtagggtcatcattaagaggttattacctccactgaaatgagtgagtagagcagaggcatttgtcaactgttgcaaatttggcagagctgggcttctgcaaagggcagcttcagattctgtgacccatggtggtaacaggactaatgctttggtctttggcagcctcctgggtgatgctcaaaaaggtgtcggggacccgttgggcaggtcccaggagagctgactgttggccttgggtcatctggccagcagcaccccttttgacaccatgcctctctgcgtgccccaggaggtctactggccttctccactgtgccacctagcattggatctgccaagttgtgttggctgaagcagaacccagagcagacaccccaggaaccttccctggagtaaggcttcccccagcgtgcctgggggtcttgggcactgctctcaatgtctcccaagtattaacccatcttgttctcatataaccctgtggggtctgcattcactctgcaaatactgagtgcctgctctctgcagagtgctgtcgtacgccccagagacacatcagcacacaaagcctgtgaagacccctgtcactgagagcctcatgtcctaactgcatgactcagcaaacacaagacacgcattgtagaatgtgctggaaggagctgagtgtgtcacaactgaaatgaggtagttggggttgccttgctaagcagtgacttgatgcaagttcgatgacgaaccccgtgggattcttatgcccattttgcagatgacgaaacggaggcacagagcaatacaatttactgtattagtccgttctcatgctgctaataacaacgtacccaagactgagtaatttataaaggaaagaggtttaattgactcacagttcagaatgggtaaggaggcctcagggaacttacaatcatggtgaaaggggaaataaatgcattcttcacacggcaacaccaaggagaggtgccgagcagaagggggaaaattcccttacaaaaccgtcagatcccatgagcactcactatccctgataactgccctcatggtcaaattacctcccgctgggtccctcccatgacacatggggattatgggaattacaatttgagatgagatttgagtgggaacacagccaaactatatcacagagtacttggtcaaggtcaggaggcttatatgaggcagagggcacccaggaacacaagcgtctgatttcaaagcccatctctaaactaaaacacaaacttttccctacaaagggcctgggaggaaaaagtggctttgcaggtcacatgtggtctctgtcacctattctttcattttttacaacacttgaaatgtgagaaaaccattcctggctctccagcagtgcaaaaacaagagcggtggcatggtttccaaccccggctctgaaccaccaggctcagcactttccaaactaagttacctcttctcaaaaccccgcacagcacaaggaagaaggcacttctattttacagatgaggaaacagaagctcagaaaggtgaaatcacttgtctgtggtcatggagagccagacagacatgatccgggcacccttttcattctgtgcaacatgtcttcattcccacttttgacacattcttaaatccctgctttaaatgcagcattcatggccagacacagtggttcatgcctgtaatcccaacactttaggaggccaaggcaggaggacggcttgagcccaggagtttccgaccagcccacacaacacagcgagacctcaacaaatctctacaaaaaattaaacaattagctgggtatggtggcttgtctgtagtctcagctactcaggaggctgaggtgtgaggattacttgagcccaggaggttgaggctgcagtgagccaagattgattgtgccatggcactccagactgggcaacagagtgagatgctgtctcagaaaagaaaaatgcagcatccacaattcctcaaagaattaaacacagaattaccgtatgatgtagcaactccacttctgggtttatactcaaaagaattgaaagcagagattcaaagagacaatcacacatccatttcatagcagcactattcacagcagtccaaaggtggaagcagccaggtgtccactgacaaataagcagatacacaaaatatggtctgtccatacaacagaatattcgtcagccttaaggaagaaaatcttgacccatgctccgacatggatgaaccctgaggacattatgctgagtgaaaaagccagacagaaaagaacaataatgtctgattccagttatataaagtccccggagtagtcaaatccatagagacaggaagtagaagggtgggtgccagggcttggggagggggaatggggagtgagtgcttcgtggagtgacagtttcagtttaggaaaatgaaaaggttctggaggtggatgatggtgatggttgcaaaacaatgcaaatgtccttaataccgatgaactgtacacttaataatggttaagatggtaaatctcatgttagatattttatcacaatagttttttaaaagcaacatttatgggaggaataattccccaacccctgaacacctgagcgaatgtccatccgtgtgtcatcaacttgtccagggtgacaagggccaggcagcagccaggcctacgagggagggagtggggggagccaaggtccgggagacggaggctcactcccgccccagatgacagacccctcgcatcacacaccaggctgactcctccacacccaggcgtgagaggtggggaggggaaacaccctgccagcgagagacccgcctgcccaactccccccaccccaccatgcccccgcccagcctggctctgcagctgtagtcctaagctgggccactctgcccgtggccccttcagtgccttggcctcgaggaagccccacgtgttgggaagttgtggcaggcagggcctgcaacctgcaaaactcccagcttctcgcaggacatggctgcggtggggactttcccaaagacccaggtgaattcagctgacagggccaacctgtttgtctttatgatcccagtgttgtcacaggcccaggactgcctgtccaggcccagggaggagtcgcttggccccagaatagcccctgcaggaggtgagcaattacctgggcaaacaaagagagtgcaggtgtgccaggcgactcacacacctgacctcaaacagacaccacagagttcagggggccacccacttattggaaaactacattatattcatagtgatcactactatttattgaggtcttattatgcgccatccactgtgcctaagtattttgcttgtaataattcattaattctcacagccacccatgaagaaagcactttcacccccaccttccaggtcaggaagctgttccgaaaggtcaagtcactggcctggtgtcactcagtaaattgagatgtccactccgtggccccctctctgtccctagcacattgattaacctctgcttttcaagggtggattggattttggagattgacaagtgctggcagagccaagggaatgaagtgatccagccagaggctacgctctgagttccgcagcaggtgcagctctccagcaatgagcccaaagcccggccatgtgggtcctaagctcaccctggaggcaaaaatccaatggagagtctccagccattccagtcgggttctctggggtctgtccgtctctgctgttgggctgagcggtgcagaggactcaggggtgccctcaggacaatgcaatcccaagaaggctgtccccctcacacacacacaaacacaaacacaaacacacaaacacacagcatgtgcagcatgccgggtacacacaggtcaaagccaagccgagggtggtggggggagggtgggcttgtatagccttcaacacccacctcaaaagccacagagcatgcaaaggaccagacacaaggaaaaccccctcccgccaggcaccttccagaaggcacaggtcaggcagatggtgatggcagaggaatgtatcaggggaagctgaggtataaaggac
